United States Patent Application Publication US 2009/0017054 A1 - sequence listing, part 2

SEQ ID NO: 4729 - protein, 436 aa, Streptococcus pneumoniae
MIHLIMISAIALAIGIGYRTKINIGLLAIAFSYLIATTLMGLSPKELLHFWPTSLFFTIFSVSLFYNVATTNGTLDVLAQHILYRTRTHPNALYMILYLMATLLSALGAGFFTTMAVCCPLAITLCQKADKHPLIGAQAVNWGASGGANLITSSSGIVFQGLFKQMGWEEQAFSLGNHIFIVSIIYPLIVLLLLSCYSHYSKGRTNSSLTIDQPPLLSKVQRQTTLLMISSMVLVWLFPLLHLIFPNIAWIATYQKTFDIGFVSILMVCLALRLKLGKQEAILAKVPWATIIMLCGMSLLMSLAVKSGLVTLIGHLMTTTIPHFWLPLFFCVIAGVMSLFSSTLSVVAPALFPIIAIISAQNPQIDIHLLTTATVIGALSTNISPFSSAGSLIQLSLPNIEERGLAFKKQIILGVPISLSLGLLTTWILILLASLS

SEQ ID NO: 4730 - protein, 61 aa, Streptococcus pneumoniae
NIVRNRFDYPDLFVLFLFHFTISQIEYDEVRSHVLGTHFLHIFHILESIDKDYWDEFLKLN

SEQ ID NO: 4731 - protein, 64 aa, Streptococcus pneumoniae
MKGKEYENRTVSFAISSKGEKMKVENISYRVDHRILFDNISFDTSSSGVTLITGKNGTGKSTLL

SEQ ID NO: 4732 - protein, 242 aa, Streptococcus pneumoniae
MSTKYLFIYNEIREKILCNKYTMNEQLPDEMTLAKQFACSRMTIKKALDLLVSEGLIFRKRGQGTFVLSRGSSKRKLIVPERDIRGLTKISEDAHSTIDSRIIHFKLEFANEFLAEKLQVALQSPVYNIYRLRIIDGKPYVLEQTYMSTDVIPGITEDILQKSIYNYIEGKLGLHIASATKILRASSSSENEQHYLQLLPTEPVFEVEQVAYLDNGTPFEYSISRHRYDLFEFNSFALRHSS

SEQ ID NO: 4733 - protein, 469 aa, Streptococcus pneumoniae
MKKKLVFPNLFWWGAASSGPQTEGQYGKVHENVMDYWFKTHPEDFFDNVGPLVASNFFHTYTEDFHLMKEIGVNSFRTSIQWSRLIKNLETGEPDPKGIAFYNAIIEEAKKNQMDLVMNLHHFDLPVELLQKYGGWESKHVVELFVKFAKTAFTCFGDKVHYWTTFNEPMVIPEAGYLYAFHYPNLKGKGKEAVQVIYNLNLASAKVIQLYRSLELDGKIGIILNLTPAYPRSNSPEDLEASRFTDDFFNKVFLNPAVKGTFPERLVKQLERDGVLWSHTEKELQLMKSNTVDFLGVNYYHPKRVQAQANPEEYQTPWMPDQYFKEYEWPERRMNPYRGWEIFPKSIYDIAMIVKEEYGNIPWFISENGMGVENEARFIDENGVIDDVYRIEFYEEHLRWLHKAIEEGSHCFGYHAWTAFDCWSWNNAYKNRYGFISVDLETQKRTIKSSGRWYRKVSDNNGFEVEIEE

SEQ ID NO: 4734 - protein, 431 aa, Streptococcus pneumoniae
MKNSKFIDQFATFAGKLGNQIHLKTLRDAFVTVMPLYILAGLIVLLNNTVFKWIFQGDTLTRFQYWGITIANGTLSISGMIIAVMVGYFLAKNRDFENPLAASMLSLVSLIVMMPNTVSVVPDGAKDAVNISGVLSFNNTGTGAMFAGVIVAIIATELFIELSNVKALQMNLGENIPPAVSRSFSVLLPVMTVISLFGVVSALLFNITGMNLISIITIFIQEPIRHIGTSLIGVIIIYSLGNMLWLFGIHQAVIYSAILEPLLLINITENITAANNGQAIPHIINLSQIQTFALMGGSGSTLCLLIATFLVSRNAVSKNVAKLSFGPGIFNINEPVLFGYPIVYNISLAIPFITVPVLGILISYLATVTGFMSPAFIQVPWTTPVFLNAWLATAGDVRAVLVQFIIFALGVLLYIPFIKVNDKVVEQEMEG

SEQ ID NO: 4735 - protein, 128 aa, Streptococcus pneumoniae
MIEIKFIPVILNNNAETTPNKEMTVMTGSNTLNDLLTAGGIFSPRFICKALTFDNSMNNSVAIIATITPANIAPVPVLLNERTPEMFTASFAPSGTTETVFGIITIKETNDSIDAANGFSKSLFLAKK

SEQ ID NO: 4736 - protein, 102 aa, Streptococcus pneumoniae
MKQILLVCNAGMSTSMLVKKMQQSATERGIEISIQAKSMTEAKKNIHEADVILIGPQIRYELLAVKEIAGNIPVDTIDMRDYGMMNGAKVLEQALAWIGEIR

SEQ ID NO: 4737 - protein, 102 aa, Streptococcus pneumoniae
MTEEMEYICFQLIANSGAAKSSFIEAIQLAKAGNLKEAKIKVEEAEDSLVEAHKIHSNLIQKEATGEKIGFSLLFMHAEDQMASTEIIQLLSKEFIDLYQNK

SEQ ID NO: 4738 - protein, 74 aa, Streptococcus pneumoniae
DSILKRKDYKSSFPSHLFYRDLSLYSLEIKKQHTLSSFYRKPVNEGLVLSAISNQCFELNGTRFLVCSLILIGP

SEQ ID NO: 4739 - protein, 890 aa, Streptococcus pneumoniae
LKAMEENMADKKTVTPEEKKLVAEKHVDELVQKALVALEEMRKLDQEQVDYIVAKASVAALDAHGELALHAFEETGRGVFEDKATKNLFACEHVVNNMRHTKTVGVIEEDDVTGLTLIAEPVGVVCGITPTTNPTSTAIFKSLISLKTRNPIVFAFHPSAQESSAHAARIVRDAAIAAGAPENCVQWITQPSMEATSALMNHEGVATILATGGNAMVKAAYSCGKPALGVGAGNVPAYVEKSANIRQAAHDIVMSKSFDNGMVCASEQAVIIDKEIYDEFVAEFKSYHTYFVNKKEKALLEEFCFGVKANSKNCAGAKLNADIVGKPATWIAEQAGFTVPEGTNILAAECKEVGENEPLTREKLSPVIAVLKSESREDGITKARQMVEFNGLGHSAAIHTADEELTKEFGKAVKAIRVICNSPSTFGGIGDVYNAFLPSLTLGCGSYGRNSVGDNVSAINLLNIKKVGRRRNNMQWMKLPSKTYFERDSIQYLQKCRDVERVMIVTDHAMVELGFLDRIIEQLDLRRNKVVYQIFADVEPDPDITTVNRGTEIMRAFKPDTIIALGGGSPMDAAKVMWLFYEQPEVDFRDLVQKFMDIRKRAFKFPLLGKKTKFIAIPTTSGTGSEVTPFAVISDKANNRKYPIADYSLTPTVAIVDPALVLTVPGFVAADTGMDVLTHATEAYVSQMASDYTDGLALQAIKLVFENLESSVKNADFHSREKMHNASTIAGMAFANAFLGISHSMAHKIGAQFHTIHGRTNAILLPYVIRYNGTRPAKTATWPKYNYYRADEKYQDIARMLGLPASTPEEGVESYAKAVYELGERIGIQMNFRDQGIDEKEWKEHSRELAFLAYEDQCSPANPRLPMVDHMQEIIEDAYYGYKERPGRRK

SEQ ID NO: 4740 - protein, 136 aa, Streptococcus pneumoniae
VENLTNFYEKYRVYLTRPRLEILAVVTIVFCAVLVFFLNIPGKGVLKLDNGTIVYDGSLVRGKMNGQGTITFQNGDQYTGGFNNGAFNGKGTFQSKEGWTYEGDFVNGQAEGKGKLTTEQEVVYEGTFKQGVFQQK

SEQ ID NO: 4741 - protein, 142 aa, Streptococcus pneumoniae
MKKLVFVCLGNICRSPMAEFVMKSMTDNYEIQSRATSSWEHGNPIHKGTQGIFQEYEIPYDKNKTSLQISKEDFEAFDYIIGMDASNVSDLRQMCPVDCQDKIYSFSSESVPDPWYTGDFEETYRRVQEGCQAWLERLEKES

SEQ ID NO: 4742 - protein, 99 aa, Streptococcus pneumoniae
MNPNITFLIMLVGMMALMFFMQRSQKKQAQKRMESLNKLQKGYEVITIGGLYGTVDEVDTEKGTIVLDVDGVYLTFELAAIKTVLPLKETASLEGAIEK

SEQ ID NO: 4743 - protein, 658 aa, Streptococcus pneumoniae
MSNLSVNAIRFLGIDAINKANSGHPGVVMGAAPMAYSLFTKQLHINPAQPNWINRDRFILSAGHGSMLLYALLHLSGFEDVSMDEIKSFRQWGSKTPGHPEFGHTAGIDATTGPLGQGISTATGFAQAERFLAAKYNREGYNIFDHYTYVICGDGDLMEGVSSEAASYAGLQKLDKLVVLYDSNDINLDGETKDSFTESVRDRYNAYGWHTALVENGTDLEAIHAAIETAKASGKPSLIEVKTVIGYGSPNKQGTNAVHGAPLGADETASTRQALGWDYEPFEIPEQVYADFKEHVADRGASAYQAWTKLVADYKEAHPELAAEVEAIIDGRDPVEVTPADFPALENGFSQATRNSSQDALNVVAAKLPTFLGGSADLAHSNMTYIKTDGLQDDANRLNRNIQFGVREFAMGTILNGMALHGGLRVYGGTFFVFSDYVKAAVRLSALQGLPVTYVFTHDSIAVGEDGPTHEPVEHLAGLRAMPNLNVFRPADARETQAAWYLAVTSEKTPTALVLTRQNLTVEDGTDFDKVAKGAYVVYENAADFDTILIATGSEVNLAVSAAKELASQGEKIRVVSMPSTDVFDKQDAAYKEEILPNAVRRRVAVEMGASQNWYKYVGLDGAVLGIDTFGASAPAPKVLAEYGFTVENLVKIVRNLK

SEQ ID NO: 4744 - protein, 80 aa, Streptococcus pneumoniae
WKVSQARQLHMQACKNLISWLFFMIQMISTWMVRQRIPLQKVFVTVTMPTVGILPWLKMEQTWKPSMLLSKQQKLQASHL

SEQ ID NO: 4745 - protein, 101 aa, Streptococcus pneumoniae
LTPLIKPTQVIQVWLWERLRWLTASLQNNFISIQLNQTGLTATALFFQQVMVQCSFMLFFTFLVLKMSAWMRLRASVNGVQKHQVTQNLVIRQGLMLRQVL

SEQ ID NO: 4746 - protein, 244 aa, Streptococcus pneumoniae
VIISTHTQLQQFSTFPKLEHVKFIGLTHCGRIWEGWGVPKERIIVVKAGDTIELKDMKIHAVESFDRTCLVTLPVNGADETGGELAGLAVTDEEMAQKAVNYIFETPGGTIYHGADSHFSNYFAKHGKDFKIDVALNNYGENPVGIQDKMTSIDLLRMAENLRTKVIIPVHYDIWSNFMASTNEILELWKMRKDRLQYDFHPFIWEVGGKYTYPQDQHLVEYHHPRGFDDCFEQDSNIQFKALL

SEQ ID NO: 4747 - protein, 135 aa, Streptococcus pneumoniae
MPNVKEITRESWILATFPEWGTWLNEEIEEEVVPEGNFAMWWLGNCGTWIKTPAGANVVMDLWSNRGKSTKKVKDMVRGHQMANMAGVRKLQPNLRVQPMVIDPFAINELDYYLVSHFHSDHIDPYTVAAILNIS

SEQ ID NO: 4748 - protein, 557 aa, Streptococcus pneumoniae
MVLDKASCDLLQYLMDQETSKTIMAISKDLKESRRKIYYHIDKINAALVDEALHIISIPRIGIHLTEEQRDACCKLLSEVDSYDYIMSAHERMMIMLLWIGISKERITIEKLIELTEVSRNTVLNDLNSIRYQLTLEQYQVTLQVSKSQGYHLHAHPLNKIQYLQSLLYHIFMEENATFVSILEDKMKERLDDECLLSVEMNQFFKEQVPLVEQDLGKKINHHEITFMLQVLPYLLLSCHNVEQYQERHQDIEKEFSLIRKRIEYQVSKKLGERLFQKFEISLSGLEVSLVAVLLLSYRKDLDIHAESDDFRQLKLALEEFIWYFESQIRMEIENKDDLLRNLMIHCKALLFRKTYGIFSKNPLTKQIRSKYGELFLVTRKSAEILEGAWFIRLTDDDIAYLTIHIGGFLKYTPSSQKNMKKVYLVCDEGVAVSRLLLKQCKLYFPNEQIDTVFTTEQFKSVEDIAQVDVVITTNDDLDSRFPILRVNPILEAEDILKMLDYLKHNIFRNKSKSFSENLSSLISSYIVDSKLASKFQEEVQTLINQEIVVQAFLEDI

SEQ ID NO: 4749 - protein, 234 aa, Streptococcus pneumoniae
MNQVINAMRKRVCDANQSLPKHGLVKFTWGNVSEVNRELGVIVIKPSGVDYDELTPENMVVTDLDGKILEGDLRPSSDLPTHVQLYKAWSEIGSVVHTHSTEAVGWAQAGRDIPFYGTTHADYFYGSIPCARSLTKDEVEVAYEKDTGLVIVEEFEHRGLNPVEVPGIVVRNHGPFTWGKNPEDAVYHSVVLEEVSKMNRFTEQINSRVEPAPQYILEKHYQRKHGPNAYYGQK

SEQ ID NO: 4750 - protein, 287 aa, Streptococcus pneumoniae
MVRPIGIYEKATPTHFTWLERLNFAKELGFDFVEMSIDERDERLARLDWSKEERLEVVKAIYETGVRIPSICFSGHRRYPLGSKDPVLEEKSLELMKKCIELAQDLGVRTIQLAGYDVYYEEKSPQTRQRFIKNLRKACDWAEEAQVVLAIEIMDDPFISSIEKYLAIEKEIDSPFLFVYPDIGNVSAWHNDIYSEFYLGHHAIAALHLKDTYAVTESSKGQFRDVPFGQGCVKWEEAFDILKETNYNGPFLIEMWSENCETVEETRAAIQEAQAFLYPLIKKAGLM

SEQ ID NO: 4751 - protein, 221 aa, Streptococcus pneumoniae
MTKRIPNLQVALDHSDLQGAIKAAVSVGQEVDIIEAGTVCLLQVGSELAEVLRSLFPDKIIVADTKCADAGGTVAKNNAVRGADWMTCICCATIPTMEAALKAIKTERGERGEIQIELYGDWTFEQAQLWLDAGISQAIYHQSRDALLAGETWGEKDLNKVKKLIDMGFRVSVTGGLDVDTLKLFEGVDIFTFIAGRGITEAADPAGAARAFKDEIKRIWG

SEQ ID NO: 4752 - protein, 161 aa, Streptococcus pneumoniae
MNLKQALIDNDSIRLGLEANNWKEAVKVAVDPLIESGAILPEYYDAIIESTEEYGPYYILMPGMAMPHARPEAGVQSDAFSLITLQNPVVFSDGKEVSVLLALAATSSKIHTSVAIPQIIALFELEDSIARLQACQTKEDVLAMIEESKDSPYLEGLDLES

SEQ ID NO: 4753 - protein, 93 aa, Streptococcus pneumoniae
MVKVLAACGNGMGSSMVIKMKVENALRKLNQTDFTVNSCSVGEAKGLAVGYDIVIASLHLIQELEGRTNGKLIGLDNLMDDKEITEKLSQALQ

SEQ ID NO: 4754 - protein, 508 aa, Streptococcus pneumoniae
LVFLFALSHYIINLQKQFKRRTIMEVVSSVLNWFSSNILQNPAFFVGLLVLIGYALLKKPAHDVFSGFVKATVGYMLLNVGAGGLVTTFRPILAALNYKFQIGAAVIDPYFGLAAANNKIVAEFPDFVGTATTALLIGFGINILLVALRKITKVRTLFITGHIMVQQAATVSLMVLFLVPQLRNAYGTAAIGIICGLYWAVSSNMTVEATQRLTGGGGFAIGHQQQFAIWFVDKVAGRFGKKEESLDNLKLPKFLSIFHDTVVASATLMLVFFGAILLILGPDIMSNKEVITSGTLFNPAKQDFFMYIIQTAFTFSVYLFVLMQGVRMFVSELTNAFQGISNKLLPGSFPAVDVAASYGFGSPNAVLSGFTFGLIGQLITIVLLIVFKNPILIITGFVPVFFDNAAIAVYADKRGGWKAAVILSFISGVLQVALGALCVALLDLASYGGYHGNIDFEFPWLGFGYIFKYLGIVGYVLVCLFLLVIPQLQFAKAKDKEKYYNGEVQEEA

SEQ ID NO: 4755 - protein, 207 aa, Streptococcus pneumoniae
MLNKIRDYLDFSGLQYRSPDKAGAEREKMLAFRHKGQEARKAFTELAKAFQASHPEWQLQQTSQWMNQAQRLRPHFWVYLQRDGQVTEPMMALRLYGTSTDFGISLEVSFIERKKDEQTLGKQAKVLDIPTVKGIYYLTYSNGQSQRWEANEEKRRTLREKVRSQEVRKVLVKVDVPMTENSSEEEIVEGLLKSYSKILPYYLATRK

SEQ ID NO: 4756 - protein, 328 aa, Streptococcus pneumoniae
MVVFTGSTVEEAIQKGLKELDIPRMKAHIKVISREKKGFLGLFGKKPAQVDIEAISETTVVKANQQVVKGVPKKINDLNEPVKTVSEETVDLGHVVNAIKKIEEEGQGISDEVKAEILKHERHASTILEETGHIEILNELQIEEAMREEAGADDLETEQDQTENQDLKEMGLKVEQSYDIAQVATDVTAYVQAIVDDMDVEATLSNDYNRRSINLQIDTNEPGRIIGYHGKVLKALQLLAQNYLYNRYSKTFYVTINVNDYVEHRAEVLQTYAQKLANRVLEEGRSHKTDPMSNSERKIIHRIISRMDGVTSYSEGDEPNRYVVVDTE

SEQ ID NO: 4757 - protein, 276 aa, Streptococcus pneumoniae
MGVKKKLKLTSLLGLSLLIMTACATNGVTSDITAESADFWSKLVYFFAEIIRFLSFDISIGVGIILFTVLIRTVLLPVFQVQMVASRKMQEAQPRIKALREQYPGRDMESRTKLEQEMRKVFKEMGVRQSDSLWPILIQMPVILALFQALSRVDFLKTGHFLWINLGSVDTTLVLPILAAVFTFLSTWLSNKALSERNGATTAMMYGIPVLIFIFAVYAPGGVALYWTVSNAYQVLQTYFLNNPFKIIAEREAVVQAQKDLENRKRKAKKKAQKTK

SEQ ID NO: 4758 - protein, 123 aa, Streptococcus pneumoniae
LKKNFRVKREKDFKAIFKEGTSFANRKFVIYQLENQKNHFRVGLSVSKKLGNAVTRNQIKRRIRHIIQNAKGSLVEDVDFVVIARKGVEALGYAEMEKNLLHVLKLSKIYQEGNGSEKETKVD

SEQ ID NO: 4759 - protein, 396 aa, Streptococcus pneumoniae
MTKTIAINAGSSSLKWQLYLMPEEKVLAKGLIERIGLKDSISTVKFDGRSEQQILDIENHTQAVKILLDDLIRFDIIKAYDEITGVGHRVVAGGEYFKESTVVEGDVLEKVEELSLLAPLHNPANAAGVRAFKELLPDITSVVVFDTSFHTSMPEKAYRYPLPTKYYTENKVRKYGAHGTSHQFVAGEAAKLLGRPLEDLKLITCHIGNGGSITAVKAGKSVDTSMGFTPLGGIMMGTRTGDIDPAIIPYLMQYTEDFNTPEDISRVLNRESGLLGVSANSSDMRDIEAAVAEGNHEASLAYEMYVDRIQKHIGQYLAVLNGADAIVFTAGVGENAESFRRDVISGISWFGCDVDDEKNVFGVTGDISTEAAKIRVLVIPTDEELVIARDVERLKK

SEQ ID NO: 4760 - protein, 317 aa, Streptococcus pneumoniae
MDFEKIEQAYTYLLENVQVIQSDLATNFYDALVEQNSIYLDGETELEQVKDNNQTLKRLALRKEEWLKTYQFLLMKAGQTEPLQANHQFTPDAIALLLVFIVEELFTEEEITILEMGSGMGILGATFLTSLDKKVDYLGMEVDDLLIDLAASMADVIGLQAGFVQGDAVRPQMLKESDVVISDLPVGYYPDDAVASRHQVASSQEHTYAHHLLMEQGFKYLKSDGYAIFLAPSDLLTSPQSDLLKVWLKEEASLVAMISLPENLFANAKQSKTIFILQKKNEIAVEPFVYPLASLQDASVLMKFKENFQKWTQGTEI

SEQ ID NO: 4761 - protein, 195 aa, Streptococcus pneumoniae
MKHDFNHKAETFDSPKNIFLANLVCQAVEKQIDILSDKVILDFGGGTGLLALPLAKQAKSVTLVDISEKMLEQARLKVEQQAIKNIQFLEQDLPKNPLEKEFDCLAVSRVLHHMPDLDAALSLFHQHLKEDGKLIIADFTKTEANHHGFDLAELENKLIEHGFSSVHSQILYSAEDLFQGNHSEFFLIVAQKSLA

SEQ ID NO: 4762 - protein, 137 aa, Streptococcus pneumoniae
VWKKKKVKAGVLLYAVTIAAIFSLLLQFYLNRQIAHYQDYALNKEKLVAFAMAKRTKDKVEQESGEQFFNLGQVSYQNKKTGLVTRVRTDKSQYEFLFPSVKIKEEKRDKKEEVATDSSEKVEKKKSEEKPEKKENS

SEQ ID NO: 4763 - protein, 168 aa, Streptococcus pneumoniae
LRFRYFLVKKDWRSTMVQNSCWQSKSHKVKAFTLLESLLALIVISGGLLLFQAMSQLLISEVRYQQQSEQKEWLLFVDQLEAELDRSQFEKVEGNRLYMKQDGKDIAIGKSKSDDFRKTDASGRGYQPMVYGLKSAQITEDNQLVHFRFQFQKGLEREFIYRVEKEES

SEQ ID NO: 4764 - protein, 100 aa, Streptococcus pneumoniae
MEKLNALRKQKIRAVILLEAVVALAIFASIATLLLGQIQKNRQEEAKILQKEEVLRVAKMALQTGQNQVSINGVEIQVFSSEKGLEVYHGSEQLLAIKEP

SEQ ID NO: 4765 - protein, 134 aa, Streptococcus pneumoniae
MIKAFTMLESLLALSLVSILALGLSGSVQSTFAAVEEQIFFMEFEELYRETQKRSVASQQKTSLNLDGQTISNGSQKLPVPKGIQAPSGQSITFDRAGGNSSLAKVEFQTSKGAIRYQLYLGNGKIKRIKETKN

SEQ ID NO: 4766 - protein, 108 aa, Streptococcus pneumoniae
MKKMMTFLKKAKVKAFTLVEMLVVLLIISVLFLLFVPNLTKQKEAVNDKGKAAVVKVVESQAELYSLEKNEDASLSKLQADGRITEEQAKAYKEYHDKNGVANRKVND

SEQ ID NO: 4767 - protein, 347 aa, Streptococcus pneumoniae
MSKLTSFLKMDISQVFRLRRKKLATAKQKNIITLFNNLFSSGFHLVETISFLDRSALLDKQCVTQMRVGLSQGKSFSEMMESLGCSSAIVTQLSLAEVHGNLHLSLGKIEEYLDNLAKVKKKLIEVATYPLILLGFLLLIMLGLRNYLLPQLDSSNIATQIIGNLPQIFLGMVGLVSVLALLALTFYKRSSKMSVFSILARLPFIGIFVQTYLTAYYAREWGNMISQGMELTQIFQMMQEQGSQLFKEVGQDLAQTLKNGREFSQTIGTYPFFRKELSLIIEYGEVKSKLGSELEIYAEKTWEAFFTRVNRTMNLVQPLVFIFVALIIVLLYAAMLMPMYQNMEVNF

SEQ ID NO: 4768 - protein, 313 aa, Streptococcus pneumoniae
MVQEIAQEIIRSARKKGTQDIYFVPKLDAYELHMRVGDERCKIGSYDFEKFAAVISHFKFVAGMNVGEKRRSQLGSCDYAYDHKIASLRLSTVGDYRGHESLVIRLLHDEEQDLHFWFQDIEELGKQYRQRGLYLFAGPVGSGKTTLMHELSKSLFKGQQVMSIEDPVEIKQDDMLQLQLNEAIGLTYENLIKLSLRHRPDLLIIGEIRDSETARAVVRASLTGATVFSTIHAKSIRGVYERLLELGVSEEELAVVLQGVCYQRLIGGGGIVDFASRDYQEHQAAKWNEQIDQLLKDGHITSLQAETEKISYS

SEQ ID NO: 4769 - protein, 123 aa, Streptococcus pneumoniae
MNMYRVIEMYGDFEPWWFLEGWEEDIVASRKFDQYYDALKYYKTCWFRLEQESPLYKSRSDLMTIFWDPEDQRWCDECDEYLQQYHSLALLQDEQVIPDEKLRSGYEKQTSQERNRSCRMKLK

SEQ ID NO: 4770 - protein, 352 aa, Streptococcus pneumoniae
MKAYTYVKPGLASFVDVDKPVIRKPTDAIVRIVKTTICGTDLHIIKGDVPTCQSGTILGHEGIGIVEEVGEGVSNFKKGDKVLISCVCACGKCYYCKKGIYAHCEDEGGWIFGHLIDGMQAEYLRVPHADNTLYHTPEDLSDEALVMLSDILPTGYEIGVLKGKVEPGCSVAIIGSGPVGLAALLTAQFYSPAKLIMVDLDDNRLETALSFGATHKVNSSDPEKAIKEIYDLTDGRGVDVAIEAVGIPATFDFCQKIIGVDGTVANCGVHGKPVEFDLDKLWIRNINVTTGLVSTNTTPQLLKALESHKIEPEKLVTHYFKLSEIEKAYEVFSKAADHHAIKVIIENDISEA

SEQ ID NO: 4771 - protein, 141 aa, Streptococcus pneumoniae
VTENPAPFVFTVSINSFFTVVAFTTGTDARNQDLVTFFEVGNSFPNFFNNPNPFVAKNGTTLASRNIPFDNMEVCSTNSGFYNTHNSVCWLANNWFVYINKRSKSWFNISIGFHKALLRFFICNIYSSIVSLFLCFFKLFL

SEQ ID NO: 4772 - protein, 383 aa, Streptococcus pneumoniae
MPNYIKADQFFYPHGVRRGGYLELVDGKFGKHVEQIPEGAEVIDYTGYSIAPGLVDTHIHGYAGVDVMDNNIEGTLHTMSEGLLSTGVTSFLPTTLTATYEQLLAVTENLGNHYKEATGAKIRGIYYEGPYFTETFKGAQNPTYMRDPGVEEFHSWQKAANGLLNKIALAPERDGVEDFVRTVTGEGVTVALGHSNATFDEAKKAVDAGASVWVHAYNGMRGLTHRELGMVGAMYQLPHTYAELICDGHHVDPKACEILIKQKGTENIALITDCMTAGGLEDGDYMLGEFPVVVANGTARLKSTGNLAGSILKLKDGLKNVVEWGIANPHEAVMMASFNPAKSVHIDDVCGQIREGYDADFIVLDKDLELVATYLDGVKRYQA

SEQ ID NO: 4773 - protein, 605 aa, Streptococcus pneumoniae
MRIKWFSLIRIIGLLLVLLYHFFQTIFPGGFFGVDVFFTFSGFLITALLIEEFSKNHEIDLIGFFRRRFYRIVPPVVLMVLVTMPFTFLVRQDYVAGIGGQIASVLGFMTNFYELLTGGSYESQFHPHLFVHNWSLAVEVHYYILWGLAVWFLSTHAKSNGQLKGMVFLLSAVAFLISFFSMFIGSFLVTSYSSVYFSSLTHVYPFFLGSMLATIVGVRQTTSLVKQLDKIWDLRKTLVVFGGGFGFLVLLTFFVKFTYLFAYLIGFLLASLAALAMILAARVLHEKTHHIQEPKIISFLADTSYAVYLFHWPFYIIFSQLTSNLLAVLLTLICSYGFASLSFYVLEPWIAGKNTPIVQTLRPLPYIHAILAAGTGILTIIVCTVTLLAPQVGAFETDLTVNGLKQAATNIGQTKVMAERADANSLGIADGTMLIGDSVALRANTALQTALPGAQINAQVSVTTKTANEIMLNNSQNKFLPKTVVIATGVNNPENYKDDWDSIVKNLPKGHHMILVTPYEGDKTKETYAIVEKAAAYMRELAEKTPYITIADWNQVAKEHPEIWAGTDQVHFGSESSTIEAGAKLYADTIATALQTAQDKPVKSK

SEQ ID NO: 4774 - protein, 380 aa, Streptococcus pneumoniae
MSDSPIKYRLIKKEKHTGARLGEIITPHGTFPTPMFMPVGTQATVKTQSPEELKEMGSGIILSNTYHLWLRPGDELIARAGGLHKFMNWDQPILTDSGGFQVYSLADSRNITEEGVTFKNHLNGSKMFLSPEKAISIQNNLGSDIMMSFDECPQFYQPYDYVKKSIERTSRWAERGLKAHRRPHDQGLFGIVQGAGFEDLRRQSAHDLVSMDFSGYSIGGLAVGETHEEMNAVLDFTTQLLPENKPRYLMGVGAPDSLIDGVIRGVDMFDCVLPTRIARNGTCMTSQGRLVVKNAQFAEDFTPLDPECDCYTCNNYTRAYLRHLLKADETFGIRLTSYHNLYFLLNLMKQVRQAIMDDNLLEFREYFVEKYGYNKSGRNF

SEQ ID NO: 4775 - protein, 285 aa, Streptococcus pneumoniae
MNYPKIDLKTIRQESKHFQADTPRLFLLYILPSMLVILSGFLNPLSRIHGTVLEQPFFSILGQILQTYLFPLLVSFIGTILLTSSVYATLTLMKDSKTEPSVKNSLALFDEERFSQTFLTLLLKRFYLFLWSIPNLLGIYLLFYSSFLAKKFVTLHPEFPNLDLSSVETERFLMVFGLYFLASLILIIVGNILYIPQYYAYSQVEFLLCYSLDLGQVPPRRILKTSRSFMKGYKFQHFVLDLQLLPWYFLNWITFGIASFSLLPYIQCTKIMFYRAVLARKRPKA

SEQ ID NO: 4776 - protein, 214 aa, Streptococcus pneumoniae
MKVLVTGFEPFGGEKGNPALEAIKGLPAEIHGAEVRWLEVPTVFHKSAQVLEEEMNRYQPDFVLCIGQAGGRTSLTPERVTINQDDACISDNEDNQPIDRPIRPDGASAYFSSLPIKAMVQAIKKEGLPASVSNTAGTFVCSHLMYQALYLVEKKSPYVKAGFMHIPYMMEQVVNRPTTPAMSLVDIRRGIEAAIGAIIEHGDQELKLVGGETH

SEQ ID NO: 4777 - protein, 89 aa, Streptococcus pneumoniae
WPPKLDCPFPLQRAQNLSLILSFLTPQNQFNETFFLKTSITYFPYSGLKRISEIRIDLQVYLKSKILIKAKIADPPCFKIIFLSAVKEP

SEQ ID NO: 4778 - protein, 119 aa, Streptococcus pneumoniae
MSIILTTIVALEHFYIFYLESIATQSDATSRVFNMEKEELAHPSVSSLFKNQGIYKALLGVFLLYVIYFSQNLEIVTIFVLFVIGAATYGSLTADKKIILKQGGSAILALISILLFKYT

SEQ ID NO: 4779 - protein, 141 aa, Streptococcus pneumoniae
MLEIQDLLYQLRLSEQASTQLFEKRLGISLTRYQILLFLLEHSPCNQMAVQERLKIDQAALTRHFKILETEGLVERHRNPENQREVLVEAAKYAKEQLVVNPPLQHIRVKEEIESILTEFERTELSRLLNKLVLGIENIEI

SEQ ID NO: 4780 - protein, 68 aa, Streptococcus pneumoniae
DLAFVMESDSRSFFLCHTLRKSLQTTSVLSETSKLCFEQPATSFLVCFLIFIEYQFEWKMESYHLVMS

SEQ ID NO: 4781 - protein, 370 aa, Streptococcus pneumoniae
MKKRMLLASTVALSFAPVLATQAEEVLWTARSVEQIQNDLTKTDNKTSYTVQYGDTLSTIAEALGVDVTVLANLNKITNMDLIFPETVLTTTVNEAEEVTEVEIQTPQADSSEEVTTATADLTTNQVTVDDQTVQVADLSQPIAEVTKTVIASEEVAPSTGTSVPEEQTTETTRPVEEATPQETTPAEKQETQASPQAASAVEVTTTSSEAKEVASSNGATAAVSTYQPEETKIISTTYEAPAAPDYAGLAVAKSENAGLQPQTAAFKEEIANLFGITSFSGYRPGDSGDHGKGLAIDFMVPERSELGDKIAEYAIQNMASRGISYIIWKQRFYAPFDSKYGPANTWNPMPDRGSVTENHYDHVHVSMNG

SEQ ID NO: 4782 - protein, 206 aa, Streptococcus pneumoniae
MQKTAFIWDLDGTLLDSYEAILSGIEETFAQFSIPYDKEKVREFIFKYSVQDLLVRVAEDRNLDVEVLNQVRAQSLAEKNAQVVLMPGAREVLAWADESGIQQFIYTHKGNNAFTILKDLGVESYFTEILTSQSGFVRKPSPEAATYLLDKYQLNSDNTYYIGDRTLDVEFAQNSGIQSINFLESTYEGNHRIQALADISRIFETK

SEQ ID NO: 4783 - protein, 426 aa, Streptococcus pneumoniae
LFKKNKDILNIALPAMGENFLQMLMGMVDSYLVAHLGLIAISGVSVAGNIITIYQAIFIALGAAISSVISKSIGQKDQSKLAYHVTEALKITLLLSFLLGFLSIFAGKEMIGLLGTERDVAESGGLYLSLVGGSIVLLGLMTSLGALIRATHNPRLPLYVSFLSNALNILFSSLAIFVLDMGIAGVAWGTIVSRLVGLVILWSQLKLPYGKPTFGLDKELLTLALPAAGERLMMRAGDVVIIALVVSFGTEAVAGNAIGEVLTQFNYMPAFGVATATVMLLARAVGEDDWKRVASLSKQTFWLSLFLMLPLSFSIYVLGVPLTHLYTTDSLAVEASVLVTLFSLLGTPMTTGTVIYTAVWQGLGNARLPFYATSIGMWCIRIGTGYLMGIVLGWGLPGIWAGSLLDNGFRWLFLRYRYQRYMSLKG

SEQ ID NO: 4784 - protein, 494 aa, Streptococcus pneumoniae
MTLVYQSTRDANNTVTASQAILQGLATDGGLFTPDTYPKVDLNFDKLKDASYQEVAKLVLSAFLDDFTVEELDYCINNAYDSKFDTPAIAPLVKLDGQYNLELFHGSTIAFKDMALSILPYFMTTAAKKHGLENKIVILTATSGDTGKAAMAGFANVPGTEIIVFYPKDGVSKIQELQMTTQTGDNTHVIAIDGNFDDAQTNVKHMFNDVALREKLTTNKLQFSSANSMNIGRLVPQIVYYVYAYAQLVKTGEIVAGEKVNFTVPTGNFGNILAAFYAKQIGLPVGKLICASNDNNVLTDFFKTRVYDKKREFKVTTSPSMDILVSSNLERLIFHLLGNNAEKTTELMNALNTQGQYKLTDFDAEILDLFAAEYATEEETAAEIKRVCELDSYIEDPHTAVASAVYKKYQSATGDVTKTVIASTASPYKFPVVAVEAVTGKAGLTDFEALAQLHEISGVAVPPAVDGLEIAPIRHKTTVAAADMQAAVEAYLGL

SEQ ID NO: 4785 - protein, 425 aa, Streptococcus pneumoniae
MSCSIDLLKHRYLKNIKENPELFVGIELEYPVASLEGDATDVEVMKDLFHYLVSTLDLTVAKVDDFGNLIQLVDPISQDAILFEVSYTTIEFAFGKAETIQEVENRFNNYMNVIQRKLAESNHAIVGCGIHPNWDKNENCPVAYPRYQMLMDYLNLSRNIIKSDLHHFPEYGTFICGSQVQLDISKTNYLRVINAFTQIEAAKAYLFANSEFSGADWDTKISRDIFWEESMHGIYPENVGVNARLLNDETDFFDYLNHSAIFTAERDGQTYYFYPIQAGDYLATSEIQAFALNGDEVIIYPQEKDFETHRSYQYQDLTTRGTVEFRSVCTQPLDRTFASAAFHLGLLVNLDKLEAYLETAPFFKVFGYDYKSLRRQFSKKNLTDEEETTIIEFSKDLLLLAEEGLVVRNKEEMTYLQPLREELSL

SEQ ID NO: 4786 - protein, 58 aa, Streptococcus pneumoniae
IPAAGVEPARPCGHWILSPARLPIPPRRQIVTGVAGFEPTHEGVKVPCLTAWLYPNIK

SEQ ID NO: 4787 - protein, 60 aa, Streptococcus pneumoniae
MGTSGLEPPTSRLSGVRSNHLSYAPKSKTWYKEQSSKRVTRIELATTAWKAVVLPLNYTR

SEQ ID NO: 4788 - protein, 77 aa, Streptococcus pneumoniae; identical to SEQ ID NO: 2935

SEQ ID NO: 4789 - protein, 81 aa, Streptococcus pneumoniae; identical to SEQ ID NO: 2934

SEQ ID NO: 4790 - protein, 51 aa, Streptococcus pneumoniae
LTQFTPYCLDRLFQSSALVSLLGPFITTYSSTGISTCCPSDTPFGLFLGPE

SEQ ID NO: 4791 - protein, 104 aa, Streptococcus pneumoniae
VEPFIGMVRTPFQRVKKGTRWELLERIKLRIPGIRSESRVRILVPRKPKVSRGRWSALGYSGPKKRPKGVSDGQQVDIPVLEYVVMKGPSRLTKADDWKSLSKQ

SEQ ID NO: 4792 - protein, 145 aa, Streptococcus pneumoniae
MSPLGSFQPRGEDTKIKNYCLLVLTDRRSRHQIIRLIPNKTAESVNQALTLLLGEHRILSITADNGSEFKRLSEVFPEEHIYYAHAYSSWERGSNENHNRLIRRWLPKGTKKTTPKEVAFIENWINNYPKKCLDYKSPSEFLLGG

SEQ ID NO: 4793 - protein, 353 aa, Streptococcus pneumoniae
MNKRVQAFLAKMQEKELDGVIINNLKNVYYLTGFWGSNGTVFISRDRQVLVTDSRYIIAAKQETSGFEIVADRDELAVIAGIVKDMGLTRIGFEDEISVSYYHRMQAAFAGLDLFPQTQFVEGLRMIKDEAEIAAIRKACSISDQAFRDALDFIKPGKTEIEIANFLDFRMRELGASGLSFDTILASGINSSKPHAHPMHKPVELGEAITMDFGCLYDHYVSDMTRTIYLGHVSDEQAEIYNTVLKANQALIDQAKAGLGFRDFDKIPRDIIIEAGYGDYFTHGIGHGIGLDIHEEPYFSQTSTETIKTGMALTDEPGIYIEGKYGVRIEDDILITETGCELLTLAPKELIVI

SEQ ID NO: 4794 - protein, 943 aa, Streptococcus pneumoniae
MQDKIVIHGARAHNLKNIDVEIPRDKLVVVTGLSGSGKSSLAFDTLYAEGQRRYVESLSAYARQFLGNMEKPDVDAIDGLSPAISIDQKTTSKNPRSTVGTTTEINDYLRLLYARVGTPYCINGHGAINASSVEQIVDKVLELPERQRLQILAPVIRKKKGQHKSVIEKVQKDGYVRVRVDGEVYDVTEVPELSKSKQHNIDVVVDRIVIKEGIRSRLFDSIEAALRIAEGYVIIDTMDDSELLFSEHYACPVCGFTVPELEPRLFSFNAPFGSCSECDGLGIKLEVDTDLVVPDASKTLREGALAPWNPISSNYYPNMLEQAMKVFGVAMDKPFEDLSEEDKNLILYGSDGKEFHFHYENEFGGVRDIDIPFEGVINNIKRRYHETNSDYTRTQMRLYMNELTCGTCQGYRLNDQALSVRVGGQQGPHIGEISDLSIADHLDLVSQLTLSENEAIIARPILKEIKDRLTFLNNVGLNYLTLSRSAGTLSGGESQRIRLATQIGSNLSGVLYILDEPSIGLHQRDNDRLIASLKKMRDLGNTLIVVEHDEDTMREADYLIDVGPGAGVFGGEIVAAGTPKQVARNSKSITGQYLSGKRVIPVPEERRVGNGRFIEVIGARENNLQNVTARFPLGKFIAVTGVSGSGKSTLINSILKKAIAQKLNRNSDKPGKFKTITGIEHVDRLIDIDQSPIGRTPRSNPATYTGVFDDIRDLFAQTNEAKIRGYKKGRFSFNVKGGRCEACSGDGIIKIEMHFLPDVYVACEVCHGTRYNSETLEVHYKEKNISQVLDMTVNDAVEFFQHIPKIQRKLQTIKDVGLGYVTLGQPATTLSGGEAQRMKLASELHKRSTGKSFYILDEPTTGLHTEDIARLLKVLARFVDDGNTVLVIEHNLDVIKTADHIIDLGPEGGVGGGTIIVTGTPEEVAANEASYTGHYLKGKLHHE

SEQ ID NO: 4795 - protein, 314 aa, Streptococcus pneumoniae
MKQVFLCTTTEFKEIDTLEPGTWINLVNPTQNESLEIANTFDIDIADLRAPLDAEEMSRITIEDEYTLIIVDVPVTEERNNRTYYVTIPLGIIITEETIITTCLEPLPVLDVFINRRLRNFYTFMRSRFIFQILYRNAELYLTALRSIDRKSEQIESQLHQSTRNEELIELMELEKTIVYFKASLKTNERVIKKLTSSTSNIKKYLEDEDLLEDTLIETQQAIEMADIYGNVLHSMTETFASIISNNQNNIMKTLALVTIVMSIPTMVFSAYGMNFKDNEIPLNGEPNAFWLIVFIAFAMSVSLTLYLIHKKWF

SEQ ID NO: 4796 - protein, 67 aa, Streptococcus pneumoniae
MSQIDLQKLTKKNQEFVHIATQQFIKDGKTDAEIQTIFEEVIPQILEEQSKGTTARSLYGAPTHWGS

SEQ ID NO: 4797 - protein, 212 aa, Streptococcus pneumoniae
LSTLLPNNSSKMGKQTLKSRLFLRKSFPKSLRSNLKVQLPVPYTAHQLIGAHSFTVKEQYEKEHPKENDDPKLMIMDSALFITSLFALVSALTTFFAADQAFGYGLITLLLVGLVGGFAFYLMYYFVYQYYGPDMDRSQRPPFWKSVLVILASMFLWLLVFFATSFLPASLNPVLDPLPLAIIGAALLALRFYLKKRLNIRSASAGPTRYQE

SEQ ID NO: 4798 - protein, 50 aa, Streptococcus pneumoniae
VGFQKNTFNTLRKSLQTTSVLSATSKLCFEQPAASFLVCSLIFIEYNSKK

SEQ ID NO: 4799 - protein, 343 aa, Streptococcus pneumoniae
MVSTIGIVSLSSGIIGEDFVKHEVDLGIQRLKVLGLNPIFLPHSLKGLDFIKDHPEARAEDLIHAFSDDSIDMILCAIGGDDTYRLLPYLFENDQLQKAIKQKIFLGFSDTTMNHLMLHKLGIKTFYGQSFLADICELDKEMLAYSLHYFKELIETGRISEIRPSDVWYEERTDFSPTALGTPRVSHTNTGFDLLQGSAQFEGKILGGCLESLYDIFDNSRYADSTELCQKYKLFPDLSDWEGKILLLETSEEEPKPEDFKKMLLTLKDTGIFAVINGLLVGKPMDETFHDDYKEALLDIIDNNIPIVYNLNVGHATPRAIVPFGVHAHVDAQEQVIRFDYNK

SEQ ID NO: 4800 - protein, 225 aa, Streptococcus pneumoniae
MMSNKNKGILIFAILYTVLFVFDGVKLLASLMPSVIANYLVYVVLALYGSFLFKDRLIQQWKEIRKTKRKFFFGVLTGWLFLILMTVVFEFVSEMLKQFVRLDGQGLNQSNIQSTFQEQPLLIAVFACVIGPLVEELFFRQVLLHYLQERLPGLLSIILVGLVFALTHMHSLALSEWIGAVGYLGGGLAFSIIYVKEKENIYYPLLVHMLSNSLSLIILAISIVK

SEQ ID NO: 4801 - protein, 187 aa, Streptococcus pneumoniae
MTKRCSWVKMTNPLYIAYHDEEWGQPLHDDQALFELLCMETYQAGLSWETVLNKRQAFREAFHSYQIHSVAEMTDTELEAMLENPAIIRNRAKIFATRANAQAFLQLQAEYGSFDAYLWSFVEGKIVVNDVPDYRQAPAKTPLSEKLAKDLKKRGFKFTGPVAVLSFLQAAGLVDDHENDCEWKGLK

SEQ ID NO: 4802 - protein, 185 aa, Streptococcus pneumoniae
VNLIAMKCFSESLAFVEYRFPRQACLIGFHTQQLKQCLVIMEGLAPLLIMIGDVERVGHLDPRTTFCHSLLLFDQHFKGRLDIVLSCICRSFKEFLDFLELCCLVAQSQHGFHSFFQFLVFSTCLHCDLGRKVISCNYYLAFQVQHHLLGCFLANFRELGQVGDVLGFNGLNQASIVISSDNSKS

SEQ ID NO: 4803 - protein, 197 aa, Streptococcus pneumoniae
MYAYLKGIITKITAKYIVLETNGIGYILHVANPYAYSGQVNQEAQIYVHQVVREDAHLLYGFRSEDEKKLFLSLISVSGIGPVSALAIIAADDNAGLVQAIETKNITYLTKFPKIGKKTAQQMVLDLEGKVVVAGDDLPAKVAVQASAENQELEEAMEAMLALGYKATELKKIKKFFEGTTDTAENYIKSALKMLVK

SEQ ID NO: 4804 - protein, 69 aa, Streptococcus pneumoniae
MTSNHFRARKKHKYTFIFFHPDYTVGFGISPNHAFRLVGYTTGRELHPALKIVIQLQMIIVLNFEYVNR

SEQ ID NO: 4805 - protein, 366 aa, Streptococcus pneumoniae
MSDSKYMKLAIKLAQKGAGYVNPNPMVGAIIVKDNHIIGQGYHEFFGGPHAERNALKNCRKSPVGATLYVTLEPCCHFGKTPPCIDAIIDSGITRVVIGSLDCNPIVSGKGVKILEENNLQVTVGILENECLNLIKSFRKYITQHVPYVFMKYAMSMDGKIATKTNQSKWITEEEARKHVHQLRHHVSAIMVGVNTVIQDDPLLTCRLEEGKNPIRIICDTHLRTPLTSKIVKTANDIKTYIATSSEDKNKMKLYQNHGCEILSIKKKGNHIDLSSLMQHLGNMQIDSLVLEGGSLMNWSALEQQIVDELKIYIAPKIFGGSAKFPVGGEGISLPNDAIRLKPYAFSQIGNDYLIESEVIYPCSQE

SEQ ID NO: 4806 - protein, 211 aa, Streptococcus pneumoniae
MFTGIIEEIGKVERIQKDSRNCKLSIKASKILTDIHLGDSIAVNGICLTVTHFNHQSFTVDVMNETWSRTALTLLKHGSEVNLERALSVNGRLGGHVVTGHIDGTGKISSIKKDDNAVWYQINTQKEILDLIVEKGSITIDGISLTVAKVSKVNFSVSVIPHTLEQTILKSKQVGSTVNLENDILGKYVQKLMDNSPKSEISKELLYQNGF

SEQ ID NO: 4807 - protein, 411 aa, Streptococcus pneumoniae
MDFSRKDNQSMEYRKIQEALEALQKGRLVLVIDDKDRENEGDLICSAQAATTENVNFMATYAKGLICMPMSESLANQLMLSPMVENNTDNHKTAFTVSIDYKETTTGISAEERGLTARMCVAEDITPSDFRRPGHMFPLIAKKGGVLERNGHTEATVDLLKLAGLKECGLCCEIMNHDGKMMRTDDLIQFSKKHNIPLITIKELQEYRKVYDQLIERVSTVNMPTRYGNFKAISYIDKLNGEHHLALIMGNIEDEANVLCRVHSECLTGDVLGSLRCDCGQQFDKAMKMIVENGSGVLLYLRQEGRGIGLINKLKAYHLQDQGMDTLDANLALGFEGDLREYHIGAQMLKDLGLQSLHLLTNNPDKVEQLEKYGITISSRISIEIEANPYDSFYLETKKNRMGHILNMEEK

SEQ ID NO: 4808 - protein, 155 aa, Streptococcus pneumoniae
MNTYEGNLVANNIKIGIVVARFNEFITSKLLSGALDNLKRENVNEKDIEVAWVPGAFEIPLIASKMAKSKKYDAIICLGAVIRGNTSHYDYVCSEVSKGIAQISLNSEIPVMFGVLTTDTIEQAIERAGTKAGNKGSECAQGAIEMVNLIRTLDA

SEQ ID NO: 4809 - protein, 649 aa, Streptococcus pneumoniae
MSHIIELPEMLANQIAAGEVIERPASVVKELVENAIDAGSSQIIIEIEEAGLKKVQITDNGHGIAHDEVELALRRHATSKIKNQADLFRIRTLGFRGEALPSIASVSVLTLLTAVDGASHGTKLVARGGEVEEVIPATSPVGTKVCVEDLFFNTPARLKYMKSQQAELSHIIDIVNRLGLAHPEISFSLISDGKEMTRTAGTGQLRQAIAGIYGLVSAKKMIEIENSDLDFEISGFVSLPELTRANRNYISLFINGRYIKNFLLNRAILDGFGSKLMVGRFPLAVIHIHIDPYLADVNVHPTKQEVRISKEKELMTLVSEAIANSLKEQTLIPDALENLAKSTVRNREKVEQTILPLKENTLYYEKTEPSRPSQTEVADYQVELTDEGQDLTLFAKETLDRLTKPAKLHFAERKPANYDQLDHPELDLASIDKAYDKLEREEASSFPELEFFGQMHGTYLFAQGRDGLYIIDQHAAQERVKYEEYRESIGNVDQSQQQLLVPYIFEFPADDALRLKERMPLLEEVGVFLAEYGENQFILREHPIWMAEEEIESGIYEMCDMLLLTKEVSIKKYRAELAIMMSCKRSIKANHRIDDHSARQLLYQLSQCDNPYNCPHGRPVLVHFTKSDMEKMFRRIQENHTSLRELGKY

SEQ ID NO: 4810 - protein, 83 aa, Streptococcus pneumoniae
LAQLTSPCCPRHFLAITNQAKRNLRMGQAQTVDNINDMRQLRLLALHILETGRRVEKEILHTNLGSHRTSRWDDFLNFTPTRD

SEQ ID NO: 4811 - protein, 96 aa, Streptococcus pneumoniae
LIFYLTGRMATQGQLHLIVGNSMTVIRDLNLLETSFLNLNDNLTRARVNGIFYQLFDHTGRTFNDLSSCDLVCQHLWQFNNMRHLSAPFCIYFPRN

SEQ ID NO: 4812 - protein, 60 aa, Streptococcus pneumoniae
LLTLSVLSTTSKQYFELSAPSFLVCSLIFIEYTTILLPLARDFVYVEGLGSYVVELFCSF

SEQ ID NO: 4813 - protein, 173 aa, Streptococcus pneumoniae
LKRFLKSINKGVQEVRLILYEKQGEKFMKVELQISETYEEEKLIVQAPQPTDKVQKVIEFAENLDQREKIKGKSDDQVYLVEIGKIQRFYIENRKVLAETASQTYSIDLRLYQVPKLLPSNFIQISQSEIINIDSISHLKLTPNGLVEIFLKNESFTYSSRRYLKTIKEKLEL

SEQ ID NO: 4814 - protein, 152 aa, Streptococcus pneumoniae
MKKQVFHDAATGVLIGLILSILFSLIYAPNTYAPLNPYSLIGQVMDQHQVHGALVLLYCTLIWATIGMLFNFGNRLFSRDWSMLRATLTHFFLMLAGFVPLATLAGWFPFHWIFYLQLIIEFAIVYLIIWAILYKREAKKVDHINQLLEHRK

SEQ ID NO: 4815 - protein, 125 aa, Streptococcus pneumoniae; identical to SEQ ID NO: 3173

SEQ ID NO: 4816 - protein, 210 aa, Streptococcus pneumoniae; identical to SEQ ID NO: 3174

SEQ ID NO: 4817 - protein, 200 aa, Streptococcus pneumoniae
MSQAISLNQSTWASKLKAMGPGILMATAAVGGSHIVSSTQAGGSYGWSLLLLVILANVFKYPFFRFGAEYTADTGKTLVEGYAEKGKLYLWIFFILNVFSAMVNTAGVAILCSAIIASAFPMIGLSITQWSLILVAIIWAMLLFGGYKLLDGMVKWIMSALTIATVLAVIIAAVKHPEYSSDFVEKTPWQMAALPSSSPS

SEQ ID NO: 4818 - protein, 63 aa, Streptococcus pneumoniae
VLKSNRASSVLKLTVFLFSADQSELMAEISIGAGIHPRRETMKAELPFAKVSSRQNQNCILDA

SEQ ID NO: 4819 - protein, 217 aa, Streptococcus pneumoniae
MPAPIEISAINSLWSAEKRKTVNFNTEDALFDFNTGYIGTAILAVFFVALGALIQYPTGQAVEAASAKYISQFVGMYASVLGEWSRYLITFIAFLCIFGTVITVIDGYSRVNQESLRLLISQKEDNRKSLNIWMTITAIIGIVIIKFFAGQVSTMLRFAMIGSFLTTPFFALLNYALVTRENKNLPSWLKHLAIAGLIFLFGFAIFFIYALAIGKAG

SEQ ID NO: 4820 - protein, 200 aa, Streptococcus pneumoniae
VATTESLGRRRGNRRAYLSIDKKELSRYNLGSCFLIIDKIMEVHMKTISLVYISLSGNTESFVTRLKDYLLSQYKGIEVQKIHIKDLVKEGKNFYEMDHPYVAFLPTYLEGGNGVDNGDVEILTTPVGDFIAYGNNASKCFGVVGSGNRNFNNQYCLTAKQYSQRFGFPVLADFEMRGMLEDIKHVAAIIADLYELEKEN

SEQ ID NO: 4821 - protein, 193 aa, Streptococcus pneumoniae
LYSFTKGAIILSGGPIMKKKPIYLWVLLILSALISVPSLFGIVSPLPSKEALRAAQKQVAGVNAQQLEDQLNYTYRVAEASHSIFNVALIVLSTILVVVAIVFLVRKNLQYANYTYVGYVLLAIIGSIYGYVGLQDAVQLVQDESMRLTVSIGSKAVSIFYIVINVLFLALVFYKMWRQQKALAEEEETEELT

SEQ ID NO: 4822 - protein, 428 aa, Streptococcus pneumoniae
MYKVLLVDDEYMVTEGLKRLIPFDKWDMEVVATASHADEALEYVQENPVDVIISDVNMPDKTGLDMIREMKEILPDAAYILLSGYQEFDYVKRAMNLSVVDYLVKPVDKVELGNLLEKIAGQLGERGKKSQTLSQELDEAGFVSYLGDKENWWIGLSKEKQGSFTIPYYVLGQDWQIFISGQPLDGLVVTPFEAPYQEHFERWKLNAEKTLFYGSVNLQQSESLFAYYEPIYRVIIQGNLNQIVEELNLLEKVVLENTPRVPITKQLFIQFVMDVFHLFEHLKADDLTDIVKTIHAIQSFDELVSYIKETLISFFGQYRMNENVVSVLEVIGRDYQKELSLKDISKALFINPVYLGQLIKRETDSTFAELLNKQRIKAAQQLLLSTSDSIEDICYAVGYSNLGYFYKVFRKLCGKSPKAYRKQVETIL

SEQ ID NO: 4823 - protein, 567 aa, Streptococcus pneumoniae
VICWNLSMKSSMKNWRQNRMKQFWLHTLLRTYSSVMIIIIASFAILLSYADWDSREKEAQRVAQRVTARTVSEIEYYHRESTQIAQALVENQARIEGIYKYFSLSMPDYFYWQLERKASPYISVSLYENVDDLYVRNDFVTGVAIAFQDYKEVYVSTKDKRSGEKIRAEDFKPAGNSFAIPVSDPVSDQDLGVIYISLDPAVLYHAIDNTRGHTPMAVTVTSPFDTEIFHIGETVDRESENWLVGLTSHGYQVQVAVPKNFVLQGTVTSSALIVGLSLLFIVILYLTLRQTFANYQKQVVDLVESIQVIAQGEEGRRIDISEKDQELLLIAETTNDMLDRLEKNIHDIYQLELSQKDANMRALQAQINPHFMYNTLEFLRMYAVMQSQDELADIIYEFSSLLRNNISDERETLLKQELEFCRKYSYLCMVRYPKSIAYGFKIDPELENMKIPKFTLQPLVENYFAHGVDHRRTDNVISIKALKQDGFVEILVVDNGRGMSAEKLANIREKLSQRYFEHQASYSDQRQSIGIVNVHERFVLYFGDRYAITIESAEQAGVQYRITIQDE

SEQ ID NO: 4824 - protein, 204 aa, Streptococcus pneumoniae
MGRFLDFVFNRFFLGMIATAFFWLLTLAGGIILGLAPASATLMSLYAEHGYSFREYSLKEAWSLYKQNFVSSNLIFYSFLGVGLVLTYGLYLLVQLPHQTIVHLIATLLNVLVVALIFLAYTVSLKLQVYFALSYRNSLKLSLIGIFMSLAAVAKVLLGTVLLVAIGYYMPALLFFVGIGMWHFFISDMLEPVYEIIHEKLATK

SEQ ID NO: 4825 - protein, 189 aa, Streptococcus pneumoniae
MKKSILTTLLFAVLYFLCMGIGVLLGNLFDQTGNMFYAPAFTALVGGSVYMILVAKVPRFGAITTIGLVIAFFFLGTKHGAGSFLPGIICGLLADEVAHLGKYKDKTKNFLSFIIFAFSTTGPILLMWIAPKAYMATLLARGKSQEYIDRIMVTPNPGTVLLFIASIVIGALVGALIGQALSKKFAQKI

SEQ ID NO: 4826 - protein, 230 aa, Streptococcus pneumoniae
MESLIQTYLPNVYKMGWAGQAGWGTAIYLTLYMTVLSFIIGGFLGLVAGLFLVLTAPGGVLENKVVFWILDKITSIFRAVPFIILLAILSPLSHLIVKTSIGPNAALVPLSFAVFAFFARQVQVVLAELDGGVIEAAQASGATFWDIVGVYLSEGLPDLIRVTTVTLISLVGETAMAGAVGAGGIGNVAIAYGFNRYNHDVTILATIIIILIIFAIQFLGDFLTKKLSHK

SEQ ID NO: 4827 - protein, 353 aa, Streptococcus pneumoniae
MSRDIIKLDQIDVTFHQKKRTITAVKDVTIHIQEGDIYGIVGYSGAGKSTLVRVINLLQKPSAGKITIDDDVIFDGKVTLTAEQLRRKRQDIGMIFQHFNLMSQKTAEENVAFALKHSELSKEEKKAKVAKLLDLVGLADRAENYPSQLSGGQKQRVAIARALANDPKILISDESTSALDPKTTKHILALLQDWNQKLGLTVVLITHEMQIVKDIANRVAVMQDGHLIEEGSVLEIFSNPKQPLTQDFISTATGIDEAMVKIEKQEIVEHLSENSLLVQLKYAGASTDEPLLNELYKHYQVMANILYGNIEILDGTPVGELVVVLSGEKAALAGAQEAIRQAGVQLKVLKGVQ

SEQ ID NO: 4828 - protein, 72 aa, Streptococcus pneumoniae
LAMSLTICISCVIKTTVKPNFWFQSCNKAKICLVVFGSRAEVDSSEIKIFGSLAKARAIATRCFCPPDSCEG

SEQ ID NO: 4829 - protein, 457 aa, Streptococcus pneumoniae
MVFPSEQEQIEKFEKDHVVQHYFEVLRTLISKKSVFAQQVGLKEVANYLGEIFKRVGAEVEIDESYTAPFVMAHFKSSRPDAKTLIFYNHYDTVPADGDQVWTEDPFTLSVRNGFMYGRGVDDDKGHITARLSALRKYMQHHDDLPVNISFIMEGAEESASTDLDKYLEKHADKLHGADLLVWEQGTKNALEQLEISGGNKGIVTFDAKVKSADVDIHSSYGGVVESAPWYLLQALQSLRAADGRILVEGLYEEVHEPNEREMALLETYGQRNPEEVSRIYGLELPLLQEERMAFLKRFFFEPALNIEGIQSGYQGQGVKTILPAEASAKLEVRLVPGLEPHDVLEKIRKQLDKNGFDKVELYYTLGEMSYRSDMSAPAILNVIELAKKFYPQGVSVLPTTAGTGPMHTVFDALEVPMVAFGLGNANSRDHGGDENVRIADYYTHIELVEELIRSYE

SEQ ID NO: 4830 - protein, 284 aa, Streptococcus pneumoniae
MKIKKWLGLAALATVAGLALAACGNSEKKADNATTIKIATVNRSGSEEKRWDKIQELVKKDGITLEFTEFTDYSQPNKATADGEVDLNAFQHYNFLNNWNKENGKDLVAIADTYISPIRLYSGLNGSANKYTKVEDIPANGEIAVPNDATNESRALYLLQSAGLIKLDVSGTALATVANIKENPKNLKITELDASQTARSLSSVDAAVVNNTFVTEAKLDYKKALFKEQADKNSKQWYNIIVAKKDWETSPKADAIKKVIAAYHTDDVKKVIEESSDGLDQPVW

SEQ ID NO: 4831 - protein, 65 aa, Streptococcus pneumoniae
MELLKNCLNNSSETLIYRQKLILNNFLKSSILSKVGDFSVFRDIVLNYISDYLITICEIKQIVRY

SEQ ID NO: 4832 - protein, 183 aa, Streptococcus pneumoniae
QLTVSKMDVTNISTTKERAEKYIYAATIAQNHNVLVVKKDDSSIKSLDDIGGKSTEVVQATTSAKQLEAYNAEHTDNPTILNYTKADFQQIMVRLSDGQFDYKIFDKIGVETVIKNQGLDNLKVIELPSDQQPYVYPLLAQGQDELKSFVDKRIKELYKDGTLEKLSKQFFGDTYLPAEADIK

SEQ ID NO: 4833 - protein, 61 aa, Streptococcus pneumoniae
LIGGRFPTLPVTTLERIKAKIMETGKNFKKRSTIVGRPLILDQDEGNHTGNPGLKTRENNR

SEQ ID NO: 4834 - protein, 224 aa, Streptococcus pneumoniae
  UNSURE (188): Xaa at each above location is unknown.
EGAQAAMPTALGYVSIGLACGTIGAPYVTPVEMGLMSLFVYAGSAQFAMLALIVVQAPVAAIAMTVFLINLRLFLLSLHASTYFRHTSLWYNIGMSSILTDETYGVLMGELAHTDKVNPMWMHGNNLNSYVAWFVGTVVGTALGGLLPNPEIFGLDFALVGMFIGIFASQFQMMQRRIPVRNLLIILXVVAVSYFLLLTVVSQSLAVLFAMLLGCSMGVVLDGQ

SEQ ID NO: 4835 - protein, 136 aa, Streptococcus pneumoniae; identical to SEQ ID NO: 4068

SEQ ID NO: 4836 - protein, 79 aa, Streptococcus pneumoniae
MKIKEQTRKLAAGCSKHRFEVADRTDEVSSKHCFEVVDRTDEVSSKHRFEVVDRTDEVSNHTYGKVKLTWFEESFEEYK

SEQ ID NO: 4837 - protein, 74 aa, Streptococcus pneumoniae
YETIAKTFIEINFTFPIDLFSSYFNLLYNSPCCGWILFSLLILFETLFKPRQLHLAVGMVTDFVSSIHNLKTVF

SEQ ID NO: 4838 - protein, 409 aa, Streptococcus pneumoniae
VMKVFLQNRDFRQLTINQWISTLGDTIFYLAFLNYVADASFAPLAILLITISETLPQILQIFLGVLADFQHHRVLKYTVISFAKFLLYSIVSLSLSGQSFSLLLVAFICLLNLLSDTLSYFSGAMLTPIFIRIIGQDHLAEAIGFKQSTVSLVKTISNILGGVLLGILSIQFISLLNALTFLIAFLGILFIKTDLLKVEKTISYQEGLSVKSFCQHLLQSSKLIWNMNKVLLVLFIISTSQAVINVTVPISTLFLRNQPFLNLQTGQSLALLSTFELSALIVGSLVSGYLQHTISIKTALYASLVIQLLLLVGFATVRFDWILIFSTLDAFFAGVLSPRLQELVFKQIPEESMGAVQSSIGAITVVLPSLFTIALVTIATSFGTLAVSFVLLLFLLVAFVMLLNIRESI

SEQ ID NO: 4839 - protein, 221 aa, Streptococcus pneumoniae
MKKIISHRYFIIVFLLVIADQKFSVLVLRSDLVAGLSDFAYYLSDMMLNFLVVLFALIAMIWSGKWQKINSRKFKGSYLFYSFLALLAFVAWNFVTFFLFPPTRNEISYQHAAPTFTGATAFLMYFFYPVIAGPIFEDMIYRGLVMTALEKGKKWGLDVLGSAVLFGVSHISNHGWVLTDFVFYMGGGLIFAVLFRMTKSIYWPIGLHIVYNGIGQLLMLL

SEQ ID NO: 4840 - protein, 65 aa, Streptococcus pneumoniae
MLNLQFAETMELTEAELETVYGGEFGNNAVIPAGAWGGLGTSWSITNFWKKYFNHDSSTVNRRHY

SEQ ID NO: 4841 - protein, 295 aa, Streptococcus pneumoniae
MQKLGGGRMIEKMELGEFYKELRLARKLKQTDVACEGLTASQLSKFELGQSMLSADKLILAIQGINVTFDEFGHKLNNYQESPHMRIGRKVVNRFAHQDIAALEQLLEEVDQEQMAQTYRRLNAIVIKDAIHSLNKSYPLAEEDSEFLTTYLYDIESWTWFELYLFCNTMPFLSNQDLIFLSTSLLEKSKEFKELVHNRLYMKQGLLNILSELMERKLFSYIPIFEAELERMLRPYDVFEKVSWQFLKKMSVFLQTKGSNQKEIERFIQSLQVLENPQLTSLFELRFQQYKELID

SEQ ID NO: 4842 - protein, 68 aa, Streptococcus pneumoniae
AFSPNVIPCKIPPVPFFQSSYHLLAFAYYIIICVHLSKHSDTLVIEKASLKLTLKGPSLVQYRTQSSF

SEQ ID NO: 4843 - protein, 205 aa, Streptococcus pneumoniae
LREGCSIYDNLYPSRIVVGDETVEGRKIAELFLSISTHSTANIKNVMLVSPTEAEAIKLFSNTFLALRVAFFNELDSFAERRSLNAEVVIKGVCLDPRIGNFYNNPSFGFGGYCLPKDTKQLKKEFIEINAPVIEAIDISNTNRKQFIVKQILERKPKIVGIYKLGMKYNSDNYKESAILSIINELLIVGIKILVYEPNLNVSYR

SEQ ID NO: 4844 - protein, 251 aa, Streptococcus pneumoniae
MVMSNNTKYIFLSPHLDDAIFSCGDYISKLTSEGEIVLVITIFSGYPLSQQLQPSAKQFHKLCNLGKYPIEERKKEDRLACERLQCDFRHLSYYECLYRKDRNGNFLYRHIYSELKNEDTLKNDIIKELLMHLDDKCVVYCPLSLGDHIDHVFVNSIGRALEFMRYKVIYYEDFPYVSDSSMVSYMGKTKELKMYQEELDEKHYIDRISSILCYKSQILIIWKSVEKLLNNIKELYLRNGAAYSIRFWIKK

SEQ ID NO: 4845 - protein, 73 aa, Streptococcus pneumoniae
KYLILEIKSLSFLSKIVNGLIQNIEENLEDDIERILKYLYICLFNEIFIIKNKVNFFDDVEFNQTLSEFLDKL

SEQ ID NO: 4846 - protein, 114 aa, Streptococcus pneumoniae
TAPQKLDLFCLTFGVQFILHSFGIHPRYPYKMSEIVEMSKKISDLNDKKEFHKKNCELRFQDSVLDNINSVPGTTHLFSCLNIQTLVKIILYIFRYNSCMKIFNFRDKELIFFK

SEQ ID NO: 4847 - protein, 80 aa, Streptococcus pneumoniae
LLPMLRIRNLNNILLRYINFQRILFKNIGEGNMRFYCETYEVITEEKKVSFFYVDEKPLRYLLFDYIFLLVLAKKNIPIL

SEQ ID NO: 4848 - protein, 538 aa, Streptococcus pneumoniae
VYTIIKSNIKKFSLLTIFIVAGQLLLIYAATINALVLNELIAMNLERFLKLSIYQMIVWCGIIFLDWVVKNYQVEVIQEFNLEIRNRVATDISNSTYQEFHSKSSGTYLSWLNNDVQTLNDQAFKQLFLVIKGISGTIFAVVTLNHYHWSLTVATLFSLMIMLLVPKIFASKMREVSLNLTNQNEAFLKSSETILNGFDVLASLNLLYVLPKKIKEAGILLKMVIQRKTTVETLAGAISFFLNIFFQISLVFLTGYLAIKGIVKIGTIEAIGALTGVIFTALGELGGQLSSIIGTKPIFLKLYSINPIESNKMNDIEPNEVNRDFPLYEAKNICYKYGDKEILKNLNFCFQRNEKYLILGESGSGKSTLLKLLNGFLRDYSGELRFCGDDIKKTSYLNMVSNVLYVDQKAYLFEGTIRDNILLEENYTDEEILQSLEQVGLSVKDFPNNILDYYVGDDGRLLSGGQKQKITLARGLIRNKKIVLIDEGTSAIDRRTSLAIERKILDREDLTVIIVTHAPHPELKQYFTKIYQFPKDFI

SEQ ID NO: 4849 - protein, 317 aa, Streptococcus pneumoniae
MDRNIDQELVSIIIPTHNRYESLIRAVKSCLHQSYKNIEVIIIDDNYSNVNLRNKIIHQFGYTNHRIKLILSNEDLGATNARNIGIKNSRGKYISFLDDDDEYMPDRILKLMACFKKSRMKNLALVYSYGIIIYPNGTREEEKTDFVGNPLFVQMVHNIAGTSFWLCKKEVLELINGFEKIDSHQDGVVLLKLLAQGYQIDIVREFLVNYYAHSKENGITGVTQKTINADEEYYNYCRKYFNLLSFNERILVTKKYYSLNIKRLLLIGDKCKALKVIKKAREEKIFNEFLFLKYMLLYNFGFFYCIYDNYVQLKFRK

SEQ ID NO: 4850 - protein, 174 aa, Streptococcus pneumoniae
LDPEKRPDRFLEFAEKLFLVREDVIFIMAGNGSMWAALKEKICHLKCRDNFRLLGEIYPATIVYQISDLLYIPYDTEGIPMCVLESMSQGTPVLASNVGGLSEIIEHRVDGFLFEKEDVEGVCACANFLLNDSEYLKYIGENSKSKIRKHFSVQKMFVETMRVYDELLEKSSHG

SEQ ID NO: 4851 - protein, 187 aa, Streptococcus pneumoniae
MVTMQYSCGKININIPDGYGDIKDIVFSAHIIVRYNNGHCGGIDPHIIGLCKKQIRRMSLYPILIIVSRDSKVIDDYKNLDIAYVDCTQCSNNFETALHVKNILKLLKIRLIHCHGYSTNYFLYMLKKLDKNGFGKVKTVITCHGWVEYNLKKKFLTYFDFWTYSMGDAFICVSETMKKRLESIIKK

SEQ ID NO: 4852 - protein, 106 aa, Streptococcus pneumoniae
KIDRDKLKIYIETHPDAYLTEIAAEFNCPPTTIHYALKAMGYSLKKSRTYCEQDPEKVNRFLKELNHLSYLTPIYIYETGVETYFYLEYDRALSRQLVSLKEDIII

SEQ ID NO: 4853 - protein, 87 aa, Streptococcus pneumoniae
MAPMTYKDTMTSDFFEACFQKFLLPTLDTPSLIIMDNARFHRMNMCKEQGIDCYHFLPIHLSIIPLRKYGLTSKTSQNNIVKLRCFS

SEQ ID NO: 4854 - protein, 354 aa, Streptococcus pneumoniae
LECFGSIISVVGNPTPGIIGSFLVEKKPHMTYNEKRLTNSLERVHMEQLKNTTDLLGLEDKNIKILSVLKYQTHLVVQPKLDSPAPPCPHCQGKMIKYDFQKASKIPLLDCQGLPTVLHLKKRRFQCKNCLKVVVSQTSIVKKNCQISNMVRQKIAQLLLEKQSMTEIAHRLAVSTSTVIRKLREFKFETDWTKLPKVMSWDEYSFKKSKMSFIAQDFESKSILAILDGRTHAVIRNHFQRYQREVRELVEVITMDMYSPYYRLAKQLFPKAKIVLDRFHIVQHLSRAMNRVRIQIMNQFDRKSLEYRALKRFWNPRFFVSRLGLNQSTGLIYYTRIASSSVRNDSISPRFECT

SEQ ID NO: 4855 - protein, 128 aa, Streptococcus pneumoniae
MHLTHREVRDKLLSYSEGLQVHYELYQLLLFHFQEKNADHFFGLIEQELPTVHPLFQTVFWTFLRDRDKIINALKLPYSNAKLEATNNLIKVIKCKAFGFRNFNNFKKRILMTLNIKKESTNFVLSRL

SEQ ID NO: 4856 - protein, 70 aa, Streptococcus pneumoniae
WVGEKLQSGEYEIRTLFFDVQSHQNPFFKIVKVPETKGFALDNLNQIIGRFKFSVGIRQLKCVDNLISIP

SEQ ID NO: 4857 - protein, 336 aa, Streptococcus pneumoniae
MKDRYILAFETSCDETSVAVLKNDDELLSNVIASQIESHKRFGGVVPEVASRHHVEVITACIEEALAEAGITEEDVTAVAVTYGPGLVGALLVGLSAAKAFAWAHGLPLIPVNHMAGHLMAAQSVEPLEFPLLALLVSGGHTELVYVSEAGDYKIVGETRDDAVGEAYDKVGRVMGLTYPAGREIDELAHQGQDIYDFPRAMIKEDNLEFSFSGLKSAFINLHHNAEQKGESLSTEDLCASFQAAVMDILMAKTKKALEEYPVKTLVVAGGVAANKGLRERLAAEITDVKVIIPPLRLCGDNAGMIAYASVSEWNKENFAGWDLNAKPSLAFDTME

SEQ ID NO: 4858 - protein, 145 aa, Streptococcus pneumoniae
MIEIKRIQQQPDLAQAIYAVMAAVYLVSPWTLEQIQADLSQDQTWYALAYDGAEVIGFLAVQENLFEAEVLQIAVKGAYQGQGIASALFAQLPTDKEIFLEVRKSNQRAQAFYKKEKMAVIADRKAYYHDPVEDAIIMKREIDEG

SEQ ID NO: 4859 - protein, 227 aa, Streptococcus pneumoniae
MKVLAFDTSSKALSLAILEDKQVLAETTINIKKNHSITLMPAIDFLMESLDWTPKDLDRIVVAEGPGSYTGLRIAVATAKTLTHTLNIELVGMSSLLALVPYQQEGLFVPLMDARRNNVYAGFYENAKPVMPEAHLSFEEVLEKVKGASQVTFVGEVAPFVEQIQEHLPRTNYKETLPNAANLALLAWDKEADSLHDFVPNYLKRVEAEENWLKNHTESGESYIKRL

SEQ ID NO: 4860 - protein, 61 aa, Streptococcus pneumoniae
MTNFDILDNQFLSLSENELSDIDGGLAPLVIFGVAVSWKAIAGGTALIGSGLAAGYFLGGD

SEQ ID NO: 4861 - protein, 76 aa, Streptococcus pneumoniae
LEGYCRWNSTYRFWFGSWLFFRRRLTMMKDLNNYREISNKELQEIKGGFGVGVGIALFMAGYTIGKDLRKKFGKSC

SEQ ID NO: 4862 - protein, 77 aa, Streptococcus pneumoniae
MIYKVFYQETKERSPRRETTRALYLDIDTSSELEGRITARQLVEENRPEYNIEYIELLSDKLLDYEKETGAFEITEF

SEQ ID NO: 4863 - protein, 559 aa, Streptococcus pneumoniae
MAYTLKPEEVGVFAIGGLGEIGKNTYGIEYQDEIIIVDAGIKFPEDDLLGIDYVIPDYSYIVDNIDRVKAVLITHGHEDHIGGIPFLLKQANVPIYAGPLALALIRGKLEEHGLLRNAKLYEINHNTELTFKNLKATFFRTTHSIPEPLGIVIHTPQGKIVCTGDFKFDFTPVGEPADLHRMAALGEEGVLCLLSDSTNAEVPTFTNSEKVVGQSIMKIIQGIEGRIIFASFASNIFRLQQATEAAVKTGRKIAVFGRSMEKAIVNGIDLGYIKAPKGTFIEPNEIKDYPAGEVLILCTGSQGEPMAALSRIANGTHRQVQLQPGDTVIFSSSPIPGNTTSVNKLINIISEAGVEVIHGKVNNIHTSGHGGQQEQKLMLCLIKPKYFMPVHGEYRMQKVHAGLAVDTGVEKDNIFIMSNGDVLALTADSARIAGHFNAQDIYVDGNRIGEIGAAVLKDRRDLSEDGVVLAVATVDFKSQMILSGPDILSRGFVYMRESGDLIRQSQRILFNAIRIALKNKDASVQSVNGAIVNAIRPFLYENTEREPIIIPMILTPDEE

SEQ ID NO: 4864 - protein, 120 aa, Streptococcus pneumoniae
LSFNLKRKHREKQLRRRGCFVALFFIWCEDHRDDDRFTFGIFIEEGANSVDNGTIDRLHASILIFQCDTNGIEEDTLALANQVSRLSHVDKASAEDIWARQNHLRFEVNSCDCQNDTVFR

SEQ ID NO: 4865 - protein, 637 aa, Streptococcus pneumoniae
MIYHFTEEYDIIVIGAGHAGVEASLAASRMGCKVLLATINIEMLAFMPCNPSIGGSAKGIVVREVDALGGEMAKTIDKTYIQMKMLNTGKGPAVRALRAQADKELYSKEMRKTVENQENLTLRQTMIDEILVEDGKAVGVRTATHQEYAAKAVIVTTGTALRGEIIIGDLKYSSGPNHSLASINLADNLKELGLEIGRFKTGTPPRVKASSINYDVTEIQPGDEVPNHFSYTSRDEDYVKDQVPCWLTYTNGTSHEIIQNNLHRAPMFTGVVKGVGPRYCPSIEDKIVRFADKERHQLFLEPEGRNTEEVYVQGLSTSLPEDVQRDLVHSIKGLENAEMMRTGYAIEYDMVLPHQLRATLETKKISGLFTAGQTNGTSGYEEAAGQGIIAGINAALKIQGKPELILKRSDGYIGVMIDDLVTKGTIEPYRLLTSRAEYRLILRHDNADMRLTEMGREIGLVDDERWARFEIKKNQFDNEMKRLDSIKLKPVKETNAKVEEMGFKPLTDAVTAKEFLRRPEVSYQDVVAFIGPAAEELDDKIIELIETEIKYEGYISKAMDQVAKMKRMEEKRIPANIDWDDIDSIATEARQKFKLINPETIGQASRISGVNPADISILMVYLEGKNRSISKTLQKSK

SEQ ID NO: 4866 - protein, 157 aa, Streptococcus pneumoniae
LMGGCTHTDSLAIFHQNLINHGLTKGQIFLIFNCLAHLLRVKFLVSLRTKSTDSWPLPCVEHLHLDVSLVNSLGHLATEGIDFTYDNPLGRTTDRGITRHESQHFNIDGRKQDLTAHTASGQGSLNPSVSRTNYNNIVFFSKMINHVSLLFLKMNVS

SEQ ID NO: 4867 - protein, 160 aa, Streptococcus pneumoniae
LCRLRERTRMTQQDFRTKVDNTVFGVRATALILQNRKLLVTKDKGKYYIIGGAIQVNEKTEDAVVREVKEELGVKSQAGQLAFVVENRFEVDGVSYHNIEFHYLVDLLEDAPLTMQEDEKRQPCEWIDLDKLQNIQLVPAFLKTALPDWEGQLRHIHLEE

SEQ ID NO: 4868 - protein, 391 aa, Streptococcus pneumoniae
VKHTRPSIVNKRIDGRLTMSDNSKTRVVVGMSGGVDSSVTALLLKEQGYDVIGIFMKNWDDTDENGVCTATEDYKDVVAVADQIGIPYYSVNFEKEYWDRVFEYFLAEYRAGRTPNPDVMCNKEIKFKAFLDYAMTLGADYVATGHYARVARDEDGTVHMLRGVDNGKDQTYFLSQLSQEQLQKTMFPLGHLEKPEVRKLAEEAGLSTAKKKDSTGICFIGEKNFKNFLSNYLPAQPGRMMTVDGRDMGEHAGLMYYTIGQRGGLGIGGQHGGDNAPWFVVGKDLSKNILYVGQGFYHDSLMSTSLEASQVHFTREMPEEFTLECTAKFRYRQPDSKVTVHVKGDKAEVIFAEPQRAITPGQAVVFYDGEECLGGGLIDNAYRDGQVCQYI

SEQ ID NO: 4869 - protein, 59 aa, Streptococcus pneumoniae
LSKRAVTDESTPPLIPTTTRVLELSLMVSLPSIRLFTIEGRVCFTIEGRLSSIHYNTLG

SEQ ID NO: 4870 - protein, 65 aa, Streptococcus pneumoniae
IDLCSYSLGTYLMISGNVIKKRLLFSNLKNRLEKMGCFIYYSYLNEDKNKVYSHHSHNLYIDYKF

SEQ ID NO: 4871 - protein, 550 aa, Streptococcus pneumoniae
GESERSKKSFGREQAANLKYQQELVKYIKYTRENNSTKRTEAEKVMTAAKKEHEKKQTELAKVLAKVIPSAEELENTRQKAEKAKEKEPELTKKLEEAKAKSEEAEKKATEAKQKVDAEHAEEVVPQAKIAELENEVQKLEKDLKEIDESDSEDYVKEGLRAPLQSELDAKQAKLSKLEELSDKIDELDAEIAKLEKNVEDFKNSNGEQAEQYRAAAEEDLAAKQAELEKTEADLKKAVNEPEKPAPAPETPAPEAPAEQPKPAPAPQPAPAPKPEKPAEQPKAEKPADQQAEEDYDRRSEEEYNRLTQQQPPKAEKPAPAPQPEQPAPAPKTGWKQENGMWYFYNTDGSMATGWLQNNGSWYYLNSNGAMATGWLQNNGSWYYLNANGAMATGWLQNNGSWYYLNSNGAMATGWLQYNGSWYYLNASGAMATGWAKVNGSWYYLNANGSMATGWLQYNGSWYYLNANGAMATGWAKVNGSWYYLNANGSMATGWVKDGDTWYYLEASGAMKASQWFKVSDKWYYVNGLGALAVNTTVDGYEVNANGEWV

SEQ ID NO: 4872 - protein, 78 aa, Streptococcus pneumoniae
KKLKLTLRKQLMSQKNQLQLQKLQPQKHQLNNQNQRRLLNQLPHQNQRSQLNNQKQKNQLINKLKKTMIVDQKKNITA

SEQ ID NO: 4873 - protein, 63 aa, Streptococcus pneumoniae
LLISWFFCFWLFSWLLWFWCGSWLRSRRWFWLFSWCFWGWSFWSWSWFFWLINCFLKVSFSFF

SEQ ID NO: 4874 - protein, 102 aa, Streptococcus pneumoniae
GAGAGFGCSAGASGAGVSGAGAGFSGSLTAFLRSASVFSNSACLAAKSSSAAARYCSACSPFEFLKSSTFFSSFAISASNSSILSLNSSSFDSLACLASNSD

SEQ ID NO: 4875 - protein, 105 aa, Streptococcus pneumoniae
GTTSSACSASTFCLASVAFFSASSDFALASSSFLVSSGSFSLAFSAFCLVFSNSSALGITFARTLASSVCFFSCSFLAAVITFSASVLFVELFSRVYLIYLTNSC

SEQ ID NO: 4876 - protein, 102 aa, Streptococcus pneumoniae
MNKKKMILTSLASVAILGAGFVTSQPTVVRAEESPVASQSKAEKDYDAAVKNATAAKKAAEDAQRALDEAKAAQKKYDEDQKKTEEKAKEVKKASEENKLQI

SEQ ID NO: 4877 - protein, 92 aa, Streptococcus pneumoniae
MYNDVIERISLYEFIGDIFYSKIISCCIVASDLSKNTMKLDVIFFEDKNKRSAVLGLRRDKSGVFKPVTLHFTSAKKYAKVRKTDVKEMKWL

SEQ ID NO: 4878 - protein, 99 aa, Streptococcus pneumoniae
LGNSENCPVLFYFEKIWSLSLKLLDCILDYQERFNGKTCQVSTNYKYLEIFKVNFCLTDLHHLFDLYKITRDYASQTKPAIQAGVFILEDFRNILCTMM

SEQ ID NO: 4879 - protein, 70 aa, Streptococcus pneumoniae
MENRHMKHFFAGIGEIKLVGYLLYICVGLAPLFHIYVIGSELSFVKIVLSILGVIFVSMLTIARIYRTFL

SEQ ID NO: 4880 - protein, 252 aa, Streptococcus pneumoniae
LGWIHICDSKMSNVDKIRKIHIIVCWMYIFLSFRAIINDTEYFLLIFLAFIYSIVSLPLYSVKNKIVSICLAINSILLMSFPILINKFFPESFLTYTVLISVFILELAIFHLIGEDFATKLTNEYKKISQFRSKVSQSPWIKYLEISSFILTIFPSILYGTVDNHVLTLIFLIKICADTTIKFLFIRLFDTSTLMKRRIFFLFALDVIVYLFLGYLLVIQKAGYLFSVLLLFSNFSVPFIKEKEYELFKNSK

SEQ ID NO: 4881 - protein, 128 aa, Streptococcus pneumoniae
MKQFQLRRRKQMELVLPNNYVVIDEEEMMYLDGGAYLSKRACQGICVALAMSSGTFIALAGAAVLTKKLINYIKVGSFGGWLIGAAAGVLAGAAGRIAYCIGYGTLNRDCDISGNPYPWDGFISATVR

SEQ ID NO: 4882 - protein, 300 aa, Streptococcus pneumoniae
MIRKLIVFLLMLPLFVLWLELHVLVNNLLLNLESPLDFVISMSLAFCSLILSKIVLDILYALKDLYKKEALITIFPFIFIGRKKVNVRFSPYFSFHRKSLSPDDLRSRIIWSFILEIAIILVFILKIPFAIIMLTTIFFWTIMDINHLVFNKTEFLFNQNKWEKEDSFESDLTKTLKDKIQKSELSYSDLMSLLLYDAMNQSTFLTDSELFEDILKKIEDSHNTLLCTGFVELLLYEMSISNNNNWSNKVDKIRIHLIRINQLDFFYYTSWLRQNFDFCMNREYHKMKSRKLLLSNKKIV

SEQ ID NO: 4883 - protein, 60 aa, Streptococcus pneumoniae
MGIKMEKIFVIIFFVCLFISSITFLAYDFVSEEIKKLIIWINVVFLILIIAMMIYPKLRK

SEQ ID NO: 4884 - protein, 124 aa, Streptococcus pneumoniae
MELVLPNNYVVLEQEEMMYLDGGFSIPRWPVATAINIAFNGVLGGGAISLVRNYIRNYGLRRVTSAIAGAAARYVGVRVANRVAGFALSAINGFAAWMSIGDAITTIWANNDVNRRDPNLNALW

SEQ ID NO: 4885 - protein, 61 aa, Streptococcus pneumoniae
IRYPFSTLFVFIGYLRFKINYCLKLNSSKPLAINDCELTNTISKFIFFDLVTQFQLAIHLI

SEQ ID NO: 4886 - protein, 226 aa, Streptococcus pneumoniae
MGFSPGIAVFYKESQTTKNLFKFYYFLYFTTLISYYFFFTFVYDKPLLLPLIPFSIIIALVQKLYRIENQQLFLLKSKVLTILESKKNCEFNLQDYHEIWKLQSKSELPCVALSYISLIKPYLSESVREQIDLLEVKRFKKINHPISLYGMLDVIKLNLYLRHYNEKNKYESMLKKILEVRPDFVLIEQNIDDSLNSSQPLSLSLAISEIQLLLEVYMGIKHVSTK

SEQ ID NO: 4887 - protein, 75 aa, Streptococcus pneumoniae
MFLHHFTEIYDTFAPFLPLLSKQKNRKPEPAVKEQFRKFPFYLFNCNQAIWLYCELWLVCHATVWFEVVPACSVR

SEQ ID NO: 4888 - protein, 318 aa, Streptococcus pneumoniae
MDIDRNRLRTGLPQVGVQPYRQVHAHSTGNRNSTVQNEADYHWRKDPELGFFSHVVGNGRIMQVGPVNNGSWDVGGGWNAETYAAVELIESHSTKEEFMADYRLYIELLRNLADEAGLPKTLDTDDLAGIKTHEYCTNNQPNNHSDHVDPYPYLASWGISREQFKQDIENGLSAATGWQKNGTGYWYVHSDGFYPKDKFEKINGTWYYFDGSGYMLSDRWKKHTDGNWYWFDNSGEMATGWKKIAEKWYYFDVEGAMKTGWVKYKDTWYYLDAKEGAMVSNAFIQSADGTGWYYLKPDGSMADKPEFTVEPDGLITVK

SEQ ID NO: 4889 - protein, 110 aa, Streptococcus pneumoniae
MQQITEIIIAFATSFLTVAVGGIVKAVKDYLLRKGGEKAVIIAEILAKNAVNAVEQVAAETGYKGDEKLAQARAKVRAELTKYNISMTDKDLDTFVESAVKQMNDAWKGR

SEQ ID NO: 4890 - protein, 138 aa, Streptococcus pneumoniae
MQIEFFNFLRSVVQTEDGLVLYALALIVSMEIIDFVTGTIAAIINPDIEYKSKIGINGLLRKISGVLLLMILIPASVLLPEKTGFVFLHSIYLGYIAFTFQSLIENYRKLKGNVTLFQPIVKVFQRLLEKDDDTKKGE

SEQ ID NO: 4891 - protein, 116 aa, Streptococcus pneumoniae
MAETNQNTDNLLDLTKITEPFELASALRYMKENGEFIRCKNVSDDFYMYRDVQKRPVIVNGRRQFKDVETVWAFNQWGGTIATINVAVLLNHEFYIMKFDAEGNPDWTVPTVEPKE

SEQ ID NO: 4892 - protein, 67 aa, Streptococcus pneumoniae
MNTEQLNQALQMTISEMSTTSTNSMITSNILSIQLNEQREENQRLQARVDELEALLDEQTKPADKGE

SEQ ID NO: 4893 - protein, 2119 aa, Streptococcus pneumoniae
MDALTRRQFDRAMFAKERTLAIRVGEYASRDIKEASFEYGYIKGDTYKPGGTCAGSGKITFTSIITTFNKLDTLHPEIGLLVGDTYQWVKMGEYFINDIEIDRNRNTTTLELMDGMFKLNREYVTDLHFPAEVREVIQEICLKTGIELANDYFGISAMRYHIEQVPEGKKLSFRDMLSAMTQMIGMSCFFNREGKMEIRDLTESNITINADSYFLHGLTKSEIEYQIAGITCKTDKKSLTVGMTTGRSLELDNVFITQSALNDLYYKLKNLTYYPYNLNYQGHLLLEVGQWVTIQTNKKETFKVPVLSQSFIFKGGLRGRISADSKAGNDTQYSYEGTITKQIKQQDGFEAKIQAQIEAADKDFDQKVDKIKKDFNDQVELAKARAEEVKRELSDTINQRFNSFDNGPLKEAKRKAEEALRNAGASSSLAQESKRIGLDSVARLEAFKSQTTSAQTALSGDLDVLKRTIANDIRPKQAQAEAEIAKQVEALSRTKNELDGASTLLAQEAKRIELDSVARLEAFKSQTTSAQTALSGDLDVLKRTIANDIRPKQAQAEAEIAKQVEALSRTKNELAGVKSAQATYEETTTRRLSELTNLANGKASKSELTQTAEELASRIASVQAGSSRNYFRNSRSRTFTTGGQAVYDYRTFIVPDFWKNSDRFKRDYVRISFDVTFPVALVNDMPAMVHFSAHPWYAYRNLIFKGGTVERQHFEFTIDLSSSSETYQTNNVFIRFGTNYGFPAGLQVVIENAMLSVGNYFPAYQPAYEDQDERVSAVESNFKQRADSLDAGVSRLTEGLRTKVDISSLNVTAENIRQSVKSLETDTQNKLNQKLSQAEFEVRAGSIRQEILNATKDKASKSELTQTAEELASKIASVHLGRRNLLKGTKELARYKPVSEYNGFKVIRTVAGATRYQDSYVERTVIPTAGTEYIAIFYARASENDYPVRCHFYNPNTVVSSENSSGYKSRSSDGLSIIRLSTDWQLCWVKWTQTATDQAKTVIIGRHGPQVGGKEGVWVEICAPAIFEGNLAGDWSPAYEDQDERVSVVESNFKQRADSLDAGVSRLTEGLRTKADISSLNVTAENIRQSVKSLETDTQNKLNQKLSQAEFEVRAGSIRQEILNATKDKADKTLVVTEAGKLREEFSKMKVGGRNLWIKSKTVGAVIEKLPENHVTGQKECYRLENNSTLTFNLEPDFSSRLYQKVTFSAWIKYENVVQGRNFWNVFNCFKHYLFRKNSETGVQSGPDYATLGMYKGSADWKYITFTYDYSEKTNFDQLKTSLRFNLEGATSGTAWVTGIKVEIGSVATDWNPAPEDADGLITEAKATFERTAQGLRTDLSAIQEYVNKDGQRQEALQRYTREESARQATAVRELVNRDFVGKATYQEDVKGINQRIEAVKTSANKDIASQIASYRQSVDGKFTDISSQITTYKQDVGGQISGLSNRLTSSEQGTTTQISNLSNRINSNKQGTDNQISNLKTQVATNKDNAERQMGRISDQVSANKANADSQFANVTNQLARKVETTDFQRVKETSKLYERILGNTENGIADKVARMALTNQLFQVEVGKYSVSGPNLIKNSDFKNATNEWGSTQNLGRLVKHSFYHNGQKDLMRLSNATKNENFLYSHRFNLERNTDYVLNFRGFNNSALASYDVYILGRRAGESDGFTIVKKVVSSKKLSTSRCEDVSVTFNSGEMDNAYIRFDNNGSSSGTADLYITEVDLYKGYKPRTWQPHPEDAVADANKKLEATQTKMTQLAGSWVVENINSAGDIISGINLGANGHNRLVGKLTHITGETLIDRAVIKSAMVDKLKTANFEAGSVTTTILEAEAVTAEKLKVDNALIKKLTATDAFIDQLISKRIFSTKVESVISSSTFLEAYQGRIGGFTLGQFDQGGGRWISGVNQFSVGMGNGAGYGVRTAFWANWGNNWNYAGPKAWNVNTDGKMYCRNEVGFYDQVDFSNSSRANFYGNTTFSRSPVFSNGIELGSKDVLGDGWNPKGGRNAVVWWNQVGSGSLKYWMEQKSDRRLKENITDTAVKALDKINRLRMVAFDFIENKKHEEIGLIAQEAETIVPKIVSRDPENPDGYLHIDYTALVPYLIKAIQELNQKIEKMEKTIA

SEQ ID NO: 4894 - protein, 78 aa, Streptococcus pneumoniae
LIKICFFRVVISECNIFPICRTFIHTKRSIIWTTLYSGLTIFSKKIMFEAIKYIPKISTLDYIFVLDPSAKSNFLVQP

SEQ ID NO: 4895 - protein, 116 aa, Streptococcus pneumoniae
MAQLTINGVAVKPPKSFQVGIQDIDGETGRNANGDMVRDRITTKRKLDCEWGMMTQGEISQLLHAVSSKFFEVSYPDPMDGQVTKTFYVGDRTAPSYTFTEKLKPWSGAKFNLVER

SEQ ID NO: 4896 - protein, 1217 aa, Streptococcus pneumoniae
MATLDELKVMIDAEIAPFRKKMKEVENQVKGTSDQVKNATAKVREQSSSIGSAFGKLAKFAGFAILGKKLLDVGMYSTQTALEVSASMNQIKRQMGESSQSFLKWVNDNANAMNMGVGEATNYGAVYSNLFSGFIKDTNKLSAYTAKMLQTSAVVAEGSGRTITDVMERIRSGLLGNTEAIEDLGINVNVAMIESTEAFKKFANGQSWQQLDYQTQQQIRLMAILEQATAKYGDTLSNSVNGRISLFKSLMKDAALNLGNSMLPIINAIMPVLNSFAMVLKNVTAKLAEFIALMFNKKATVKDGVGGAVGDMGNAMKDAAGGAGDLADAVDDAGDSAGGLADNLGDSAKNAKKAAKELLGLLGFDEINILQKPKDDDAGGSGGGGKGGKGKGGGGGPFKDILPEVELTDMDNKFKSIFDGLGDKLKGLFDLFKKGFDAAFRPEGIERIKTALDQIAKTMGEIATDPRVVNAFNRMAEKIAYALGQVTGSITTIGLGIGVFLAESIANGLGRQKERITRALVALFDNIGNISEAVGNIAQDFSSTFYDVITSTGAVRIGSAIVSTLLSLTSTIVEVGSKLAGSLFKGFEKVVVTSAPKISSVFQSLLDTVAPVFESIERSVNKFGDGLSRVYDEHVAPAINSIANAFNGLIDIIQILWENSWQPFAEFLSGVFGVSIEGISDLLGGGLLATLGLLADAIKLVADGFTVFSDWCKENKEPILALITTWQTINFLSWAEQAGGLAGAFSLLGSKVSLIVGGIKNLGLAIKALTFDKLVSFGETIYLNTLYAKDFVVNSGKTIAQLGKTALELGKSALAWTAHAAKMGLATAAEFAHSVAAGVATAATWAFNAALAVLTSPITWIIAAIAALIAIGVLLYQNWDTVVEFAKTAWQGLCDFISGICRAIGEFFSGLWTKLQEIFEPIGQWFGEKFQQAWDAIVNIFSGIGEWFSGVFQGAWDAIVNIFTPIGSWFGQRWADVTSALANIGAWFTDIFQKAWTGLTNIFSKLGLWFGERWADVTSVLANVSSWFGNMFTSAYNAVKNAFSSIGGFFSGVWSTVQSIFVNAGQKVGSAVGGAFKSAVNAVLGTIENVVNDFIGMINGVLGVVRNLPGLGWVGSVSTVSLPRLARGGIVDSPTIAMIGEAGKEAVVPLENTGFIQTLGRVVSSAVVNAMAGISPQGGFSSDGDIVIQIAGHEFGRVAIQEINKEHERAGQTLLKI

SEQ ID NO: 4897 - protein, 186 aa, Streptococcus pneumoniae
LKGPPPPPFPLPPLPPPPDPPASSSFGFCKMLISSNPKRPSNSLAAFLAFLAESPRLSASPPAESPASSTASARSPAPPAASFMALPMSPTAPPTPSFTVAFLLNIKAINSASLAVTFFKTIAKEFKTGIMALIIGNIELPRFNAASFISDLNRLIRPFTELDKVSPYLAVACSRIAIRRICCWVW

SEQ ID NO: 4898 - protein, 69 aa, Streptococcus pneumoniae
MISNHVSLLLSKDAKAFEFWEYAPELFVEEQQAVEQERQKQALLLHKERMREFAERHNRKRKEEVNGNS

SEQ ID NO: 4899 - protein, 72 aa, Streptococcus pneumoniae
SIGFYSTRKQGQENFQEENDSRQVILTVTQIIERLYPMFLDIEGKPLDFWDLTVLEIREMIESYNRVKIQER

SEQ ID NO: 4900 - protein, 126 aa, Streptococcus pneumoniae
MALKYTTWKVTDEKELKLRLTSHQTATVEEKIGMNLLKIFMPEAGEEFTLPPLKVMLLLVHGALQQYEHGYSLEDVYDLYDEYVDNGGDQTTFMTEVLMPLFEVSGFTPRGSKDKKTSKKKMTVDK

SEQ ID NO: 4901 - protein, 137 aa, Streptococcus pneumoniae
MLANGITLSYGETKDSYTKLVGLKEVPEFGIELEKVENTTLEDTVKKYEFGIGDIGELEYKFSYNNSSATAPYRVLRKAADDKKKLYFEQAYPDGTKVIFEGQVSVKLGGGGVNAVIDFTLKIALQSNLTFTDGIGG

SEQ ID NO: 4902 - protein, 122 aa, Streptococcus pneumoniae
MINIKPVIYKELQKVADNVTDTYPSDWETFPVVIFLEEQNKPGDWFDDQEQKSSIRYKVDIFDDTSTSELAVKINQIFESLGLRRTDCQDVPDPSHLRHKVMRFEGIVDLHSELVFQFRMEN

SEQ ID NO: 4903 - protein, 171 aa, Streptococcus pneumoniae
VSGLLGADRLIAKCRRLASKKTGEDIVLRAVHNATIKVVQADARRLAPARDGELITSIKTRAKMDGDKAIGEVYTNLKYAPYVEFGTGPIGQASHSGISPEVSVTYKSSPWYVHEDQINVGPYHFQKIGEFYKMYGQPAQPYLYPALRDNQERVSKNISNYVRRKIREQIK

SEQ ID NO: 4904 - protein, 60 aa, Streptococcus pneumoniae
LILVISSPSLAGASLLASAWTTFIVALCTARKTISSPVFLLANRLHLAISLSAPSSPDTL

SEQ ID NO: 4905 - protein, 112 aa, Streptococcus pneumoniae
MFLKQSRLKPYPMRRFEKTVTEEGVAKEGYAKEAETVRLELWPASSKLQSELYGERVNDILNANANKSATIKVKDGVCIDSQTEVTHRVISKKVYTHHQVLELERVRATRGR

SEQ ID NO: 4906 - protein, 103 aa, Streptococcus pneumoniae
MSIELLKKLTGEEDTQLLMLLQTRATNLILSETNRTSLTPALSLLIPEVAIELHNRSGAEGEHSRTEGGIAVVYGENGLSTDLLQRIRMHRLARVAGHVFEAE

SEQ ID NO: 4907 - protein, 62 aa, Streptococcus pneumoniae
VKFKIKQDFYDWESNVKRLAGEELEITEERYAELADNIASNGVTISDVLEKILPEPEFLEED

SEQ ID NO: 4908 - protein, 60 aa, Streptococcus pneumoniae
MSLLLRRHYIQEEQVNQYSDLENKTLEELKDLAKEAGVAGAYKLTKAEIVEVLEELKSEI

SEQ ID NO: 4909 - protein, 281 aa, Streptococcus pneumoniae
MTAGQTKLATMVNPEVMADMVAAKLPKLIKFTPLAYVETKLEGQPGSTLTVPAWEYAGDATEIEEGQAITPDQLTTKKTTMTIKKAGKGYEITDESLLSGLGDPLGQATYQLGLAIANKIDNDLVAVAKTATQHITETPTTLEAIDKALDIFEDEEDAQYVAIINPKDATKLKTAVAKEWIKGSELGANMVVSGTFGEVDGVQIVRSKKVDEGKGFLVKVSPSQTQTDDANKYGAFVILLKRDVAIETDRDILKKTTVITGDEHYGVYLYDPTRVVKFGGA

SEQ ID NO: 4910 - protein, 194 aa, Streptococcus pneumoniae
MSEEINATVSTESTETVDTQGNVDSVQEEKHERTFTRAEIGKMLSAERSKWEAEQEAKENEAKKLAKMNADEKQKYQLDQREQELADREKAIARKELTAEAKAMLSERDLPVELVNVVDLTSAETVSQSVAVLQKSWEQAVQKGVQEKLKGGAPMKQAPVDSDGITKEEFARMGYQSRNELYQKNPELYKKLKG

SEQ ID NO: 4911 - protein, 85 aa, Streptococcus pneumoniae
LRYYPYRSLKERNRKMEEWKERFKKEYYELKERFQKLDMMIGKYEKGQLEFESKCPIDSLKGQRSTMWNYLRILEQRAKIEEIKL

SEQ ID NO: 4912 - protein, 75 aa, Streptococcus pneumoniae
MAILDDLQALYDNGWDASFNYNGQVCGIFPNSIYDVVVIIADDEYRASSFDDLISLQIEGKTLPEIMNEVEVQYG

SEQ ID NO: 4913 - protein, 467 aa, Streptococcus pneumoniae
MKNQEYWAKRKANLIYQQMDKAEKQADQFDKVYQEAKTYLDKEINKIFDKFQRDYGLSQVEARQVLKNMKDKKNLNELRKVLEARPNDPNIQRLLADLDSPAYSFRMKRLERLSDDLDRMRESIYHSEKTGSDAFYSDLMKDSYYKATFDLQQQTGLAYGFSGLPENEIKHLQSFSWVGDGSTYSTDIWKNTGKLTSSIKDELLISLMTGRDTRETAQAIAERFNVGQNDARRLVRTESAFFHNQMELLSYEEADIEKYIFVAVLDKRTSRICQEHDNQVYDRDKAVPGVNCPPMHPWCRSTTVGYDEDADYSKLKRRARNPETGKVEYVPADMTYKEWYSKYVDGNRESIKRKAFDKTIKDGIIVSVSGTTIGHTPPGKIGLPNSVVQHNATNGDVLGRTYYDARGFKTKDVHFTNHKQPARHPYGKIGEHAHDFVFDDEGKFVSRSTRELTDDERKENQDILWRY

SEQ ID NO: 4914 - protein, 489 aa, Streptococcus pneumoniae
MYQYLTYPRDGYDEGSLKKDLIYKLITIHNTESSRLKNLKSYYMGDHAILNHKRRNVNAPNYKTVANHAKDIADTATGYFMGNPIKYNNTADGDIDELLTAFDGAEIDQVDAQNALNMAIYGRAYEYIYAKEGMTELDSTSIDPENTFMVYDDSIERKPLFAVYYYEVKDDTKDTTKHQAEVFTENLHYHMVLRSTDSGTTQSEEATPHNLGQIPIIEYRNNHFAIGDYEQQISLIDAYNSLMGNRVNDKEQAVESILVLYGTQLADTPEDAKVAMKILSEEGLLELPGDSARAEFLKNTLDESATEILRTALKEDIYTFSHVPNLTDENFAGNTSGVAMEFKLMGLEMITKTKEANYKRGLRQRIAIFAHYLGMKQIALESHSIVPQFSRGLPKNLLEISQIVNNLEGKVTNRQLISLLPFVEDPDAELEALEEEKKKNMEDMPMFNKDNTKPEDEVEDEESGVLGEEESQSDLPADGQGRKAGRPVR

SEQ ID NO: 4915 - protein, 432 aa, Streptococcus pneumoniae
MSQTYQIKQNDIVVDLPKTVGAGYGQFWRSRSLYRVVKGSRGSKKSKTTALNYVIRLLKYPWANLLVIRRYSNTNKQSTYTDFKWACNVLGVTHLFKFNESLPEITIKATGQKILFRGLDDELKITSITVDIGSLCWAWFEEAYQIETEDKFSTVVESIRGSLDVPDFFKQITVTFNPWNERHWLKRVFFDEETRRADTFATTTTYKCNEWLDEVDIKRYEDLYHTNPRRARIVCDGEWGVAEGLIYENVTVKDFNKDELLQDSANKLCIGLDFGFTHDPTALCCSLINDTTKEIYVFDEAYKVGLITKEVAKMIKDKGYHRSQIIADSAESRLIEELRSEHGISRIKESRKGKDSIMAGVSKLQGYAIYVHPDCKNIMDEFYSYCYQRDKEGNWLNKPEDKNNHLMDALRYSLQCIEGGKATVRRRSDYGL

SEQ ID NO: 4916 - protein, 159 aa, Streptococcus pneumoniae
VAFFDYSKGGDGKLSGLRIKQKRFADEYIISGNATEAYKKAGYRVSSDRVAGVEGHKLLKNPKIKSYIDERLKQLDSEKIADQQEVLGYLTSVMRGETQEQTLISIGELGQTITDIDVGAKDRIKAAELLGKRHRLWTDKVEADVSGTVVFANESDISD

SEQ ID NO: 4917 - protein, 134 aa, Streptococcus pneumoniae
VNKAKELLKELQDLDMDIQSRIDEINELEAGLLSSPKWSEVKVQGGQTRKVDDVYTQLVVMKEAIEQDTKEVINRKLELGRMINRLKNPKYRAVLRMTYINKGTADSVCYDLNMSRTTYYRLKNEAVLALEEVI

SEQ ID NO: 4918 - protein, 123 aa, Streptococcus pneumoniae
MRPCKYPYSGRRKKQETPSPIFSARPIFDEVPIVEEVKVEFGVEASMGRIYPETLIHLDISGYGNRVHSVHRFPGILLSVGESIQLKMLFYKRLRNFTTDRFLTFRESDWKFFIRDLVNEFKH

SEQ ID NO: 4919 - protein, 145 aa, Streptococcus pneumoniae
MIPKFRVWVKIGKRMVFSDDILAIDYENKEIVTQQVYFENGLPDDRDIYCYDFDEIELMQSTGLKDKNGKEIFEGDIVRTTRFLGRADEIGGFYEYDKEFIGIVKQLEGSWVIDTGSDAVCLWTEIEENEIIGNIYENKEFGGRK

SEQ ID NO: 4920 - protein, 152 aa, Streptococcus pneumoniae
MDDILQALAKMLNMTVDEVSSLLTTFKGNAPQIYEMFVKEKMFYDLFSLFQIMSIVIFSISAVVLAVLTLIYFTYDGGFVYSYDIRTGKTEEEIKLERIERKRKDLKIPLKISCISSSASLITLVIAIVLKATLAPNYIFIVNEILPKLTKR

SEQ ID NO: 4921 - protein, 86 aa, Streptococcus pneumoniae
LKRFIAIWILLSAGLNIWQSIYIKKLEEKRPIVVYKADNAGAEIFGKVVEKGRHGKLYTLTIRDYGVFVVTKDVYEKVKVGDEVLL

SEQ ID NO: 4922 - protein, 231 aa, Streptococcus pneumoniae
MNKQELIKRIEDLPYTEGPIADTIEINRNWILKSIEQLAESEIGHADEAPRYVKNILARLRELPLHDREFWLKAIMSEFEQDFSHAKWREGYEQGKIEGMVEREKVIVPQCVAEYIEFKKKNNFHVYGAMRVIEDHYDKKVPDWFYENNIEKFCLAWLDGYEVEKEKRYFVKIKGNIKENMLVYGELLKRYFFTKSFSLDDVIYSHTRKELENAKIGWVFDCEGFEIEEVE

SEQ ID NO: 4923 - protein, 449 aa, Streptococcus pneumoniae
VIVIGNVVSIDSQPKMITTAKGDIKANSPSNVLMSFKADDQLSIYLKHNDFSQEHELLKDIKIGNTLFKKGELPSNFDSVVKVYFESVLGVAFSSQAMLDGMETFFSERSYNPVIEYMEKAAEKWDGRKRIDRMLQVYLGAEDIPLVSKIAQMWLVGAVAKVYDPYVKFDYVLDLVGGQGVGKTSLLQKLGGEWYTDAVTDFSNKDNYDIMLKSLIVNDDEMVASNRMSFAETKAFISKTSLRYRKPYMKRTEEFAKNFILARTTNQTEYLKDKTGERRFLPVMADSKRQKKHPMEIEPETIEQIWGEAVTIYRAGADLMFDENTEDELNIYREQFMYRDEVELQVLEYLDMPVPENWQNWSIQQQHQYTSKYFDNSSDFDPGSKKLDKVSTREMMYNLFMRNSNDRKLSTKINMIMDNHPDWKKSVFRAGGKSTKGFVRVKDSEKTNR

SEQ ID NO: 4924 - protein, 273 aa, Streptococcus pneumoniae
MPSMKEYALQYQKLGFSVIPINPKNKMPLIEFADKPAMTPSEIENFWDGYPNANIALKTTNFFVIDIDKHGKSNGFESLKKWKHLNLIEPTLQAKTASGGKHLFYFKREDEPITQMIGFLPGVDIKAHENNYVLVAPSATDKGQYEWDLEKSKEGGTMVTPSKYLIQSIKKQYGETHGYKYDGKDGLRDLVRRSHTRDRTQTTDLFETIALGFGDEGGRNDKLAKFVGGLLYRAVDDGVVVQLARLANANSPTPLPEKEMMRTIESMIKKDRR

SEQ ID NO: 4925 - protein, 77 aa, Streptococcus pneumoniae
MAGLSANSIKGILFLGLIGMTENPNFWYCNAYSFIDGMVFSPLCKYKQVPGPYSLTDIHLQSFLNKITTIDKPLQMY

SEQ ID NO: 4926 - protein, 65 aa, Streptococcus pneumoniae
PPFLKNSKFWVIDETDERLGPFNTFEEAYQSLLFYLKMTEDEYQSNYTAQELVYIYKEEKKPCRR

SEQ ID NO: 4927 - protein, 168 aa, Streptococcus pneumoniae
MSLLDIAKSIKKEGFDPRKDSANGPAPIPAGTYPVVLKKATFNVSDKGWESLGYQFEIRGGDYSGRSEFATFGTLTEWNGKNLDWAVERTMKFFIKALVLAGDSMQGNEEDGKALEEALQRKAVGSYYNLVISVTKGKDGREFRNYDLEEEEAQPLTEADIDEDDLPF

SEQ ID NO: 4928 - protein, 275 aa, Streptococcus pneumoniae
MAFTLPANKPQVPKDTPRNFFIYGETMSGKSYLANEFPNPIVLNTDGNAEANTVPSIQLINEKDDKGRITNSVIKQLGDILLALQTQKHSYETVVIDVIDDVIEMIKIAVCDELTPVGKPRLKSLSEIPYGKGYDFFNQAITELVIDLKALPMNVIYISRQVSEYDDNGNATKDKPSLKDKYVNLINGNSDLMIHTEKLGNNYNREVDRKRKTYYADQVDDKAILKILATIRGAVEPAKGKLAPKKEAAKTTKPAKTEKTKEAPKKEVDSDDELF

SEQ ID NO: 4929 - protein, 105 aa, Streptococcus pneumoniae
MNKTTEMIVFRSRKTGEFLNSYKDRSSLAFAADFCSLEYCLKLPRKKYEDNKKTYKALAAAFDCEIVAVEAEYKLTYPNGSEVEPIKRDRSSIEDMIKDIIGGVL

SEQ ID NO: 4930 - protein, 397 aa, Streptococcus pneumoniae
VSITITLRKWQAEAIKRSEHLSNGIFLEALGGRGKTICALAIAKHKKAKKIIITNNRLAILNGWIDAVKFMNFDKGVEIIIQTDRYLQNQVKKGHKLDCDVLIVDEWQNMSSDKQVALYRKIKRKYTIGLSATPIRKKGQNFYPLEKTVFGWATPNNKFDWQKTHGKMVYDPFSYSKEKWEDFQNYESYISSLPNFFRWEEIEGIENAVENNGFEIKFYQKRVASGNPEKLAEFRKLNLVTVDGKTAMAKQSFGRKTFERYLNQTGVAVDFPKLKPVNADTPLMLQLDGLIERAPHDMLIVSKSKQIVNVISERHPEIGIWTGDIQEGLYKKFVVATSQVLGVGVDGLQHKYQTIVVLDPVEEGSGEYDDYRQLLWRITGSRQQHDVNVIEFYYKES

SEQ ID NO: 4931 - protein, 162 aa, Streptococcus pneumoniae
LMKILAIDPSSNKIETSTTGVVLLDNARLVDSWVVSYGMRGFADWFHEIGTNLEFDVVIVEEFKARDNDKSKDNSVAETIAYIQLCYPGAILQFNAGYKSDIPNDLLKILDLWKFEKSHHQDIRAAARLGLFWAMRNDIEEVVHDIGKVVSEYHNNAKKVAS

SEQ ID NO: 4932 - protein, 119 aa, Streptococcus pneumoniae
MELMNKTRVTDSLAVVIGPESIEVLVTEGFLFDVAIRFVKVDETNLDQGNEKPVFTPEYKLVTVAKYKEKPIFESEEDIRKFEKQAKEVKSLFAFAKVNKQNWFNTALYPGVLTEKVGV

SEQ ID NO: 4933 - protein, 160 aa, Streptococcus pneumoniae
MASLYELTGQFLTIYQLDIDDETKADTLEAIDWQEQFEQKAEGYAHVIKNLEADVAMYKAEEESFKAKKQVAQKKLDYVKDNIMAAMNVTGQTEVKSGALIIKIAKNPESVKVNEDDLPKKYFTKKVTLAPDKKTLKELLKSGKKVKGAELVRTEKLVIK

SEQ ID NO: 4934 - protein, 257 aa, Streptococcus pneumoniae
VKSMPRSLCWKDEYTEYMHEICPGRLTPEVTRLLNEKFGTNYNKSQIGGVRKRLGLAVGKVYQGRLLTKEQHDYLVLIQKNKISRNVANEMNQKFGLSLTEKQIKSYRRNNNLHSGLTGRFEKGQTPHNKGKKYPNMPKNGGQFKKGNRPPNYVPVGTINYTTNGYPKEKIGEPNQWVLKHRKVWEDHHGLIPKGYSIVFLDGDKTNYDISNLACLSKNEIARMNQNHLFTSNADLTKSGIGLTKLTNKIREVEKNG

SEQ ID NO: 4935 - protein, 76 aa, Streptococcus pneumoniae
MVRNKIGDLTNTLFAQLETLDDRDLTADELKVELQRSKQMVAISGQILQAGQLALDAEKFKDKVGEVNAPIALLEG

SEQ ID NO: 4936 - protein, 113 aa, Streptococcus pneumoniae
MTQAERIREYYREHPAASYDEVAEVVGTTNSNVRANLAKDIKAGRCVRLEDKSYDYSPYYNHTQALTELVDWKNDNRREWVDMLTRAAEKETDSNVMRLLIKEANKLMKEVTK

SEQ ID NO: 4937 - protein, 62 aa, Streptococcus pneumoniae
MEYIYLVTIVGIGLWSLVNKLDDHAEMKQKERQLMANNVARMNLRNSDKQFTYDVEPPEGLK

SEQ ID NO: 4938 - protein, 86 aa, Streptococcus pneumoniae
LEKRNGNKQENEVSRMNLLSRIKNYFSEEVKETNLDWKEVALDLNQSLIETQEKLQEANQEIADLKKIVAIYKEKEKEKRWNIFTW

SEQ ID NO: 4939 - protein, 90 aa, Streptococcus pneumoniae
MEAVEIVRIKDVIIEKVSANDEELKRIFGCSKRQAGERRREMQKLPSQQKHLLDSGQLVTIKGFYEYLQYRGTKAWKKEMETSKKMRSAG

SEQ ID NO: 4940 - protein, 79 aa, Streptococcus pneumoniae
MTEIHACLCGNWVNLSADDDCVMGPNMASPYIWWEENAELYSPISKPEANSMYHQDYIYIHYRGADYRIHPMFIQIVSR

SEQ ID NO: 4941 - protein, 63 aa, Streptococcus pneumoniae
MKSFKDFRESLTAEDMQAISAKANEATKQIDHTDGLQLGKVSGLTSVITTIELLEKYHEWLHS

SEQ ID NO: 4942 - protein, 67 aa, Streptococcus pneumoniae
MRPRRYPYSGKKESTFVKADPELVEKLLRNTSFLERLQKKPINFQIDSEEFKRLSYEAIHDTSQVTQ

SEQ ID NO: 4943 - protein, 66 aa, Streptococcus pneumoniae
MESVLESLKQEKDHLEKIIKVVTSGGKFLRLPYQKKSRSISENLKLISQNLDKLSEQVQQTTNQHS

SEQ ID NO: 4944 - protein, 71 aa, Streptococcus pneumoniae
VQWTLEAMRINKGLTQAELAEKFEVSSQTIARLEKDSSDIGYQLLKKYMFFFNVKFDDIFLGKKYENFVNN

SEQ ID NO: 4945 - protein, 67 aa, Streptococcus pneumoniae; identical to SEQ ID NO: 4942

SEQ ID NO: 4946 - protein, 229 aa, Streptococcus pneumoniae
MIFRVKVNSSVSRPVTVEDICPNCKKPTNPDLVNSSYFSLGENKTSLVLTCRCLGCKHFWTEEFIATRFLINDYTEKYEIEHIKVIPNLPSDIPISDDVEIVSPIGKQIYVQALKAEHEQLDHIAGIGYRKALEFFVKDFSIVTNPDDEDKIIKMSLKQVIEKYIKDEDLKTFALASAYIGNDEGHYYRNNPDKGFTDLKNYLHGVIHYMEMKLNFLDAQELVNRSKKS

SEQ ID NO: 4947 - protein, 263 aa, Streptococcus pneumoniae
MDEKKRMQIIAENITHFRKQRGITQKELAKEVGITASTMTDYMKLRSAPSFGVIQKLADYFGVKKSDIDTTFKEESTNSLPDAPDSLTQQIMDKVVQLTPPNQKIVLRTSEELLESQNEEETKINEVSEVISLYQVEVVSETAAASGFNYGFGYDDTDRETIEVDERPPRHDIATKVSGDSMQPDYQDGDILYLVDKGLTTYNGDLAIIAYGDRSYFKKIYTENGRLRLVSLNDKYEDIILDFPPAEDTHIKIYAVVGVYRGE

SEQ ID NO: 4948 - protein, 316 aa, Streptococcus pneumoniae
LKPFKTIEEQIATLKIRGLSITDESKAAKYLLSNNYYNIINGYSKFFQHPGTDTYIDGVTFDEVSSLYTFDKDVKRAILQAILEAEHHIKSITAHRFAEAYPSQKYAYLNTNSYADNKILDVGFIVSKLSKIINTNKRYRGNSIHHYAHTHSDVPIWVLTDYLEFGDLRTIIENLPNSLQNEIARDLVSFISTNIPDFNDVFPPETLISFLKNINEVRNKCAHNNRLLNFRCRSNSTFWETIHNKEILMGDDSRKTVYSTIISLQCFISKAAFNILWNTLRKKVIKLEKKLPSIDINVINQSLGFPNDWHRNEPKV

SEQ ID NO: 4949 - protein, 58 aa, Streptococcus pneumoniae
LFRTSLIFFRKDIKVSGGKTSLKSGMFVLIKLTKSRAISFWSELGRFSIIVRKSPNSR

SEQ ID NO: 4950 - protein, 375 aa, Streptococcus pneumoniae
MWMEELPNGKFKYFERYKDPYTEKLKKVSVTMEKKTPQARNQAAILLQEKINKKLSTKQVESITFEEIYNLFYKSWAQTVKESTKHNCKSVDKKMKEVIPSDTILANLDRRFLQEAIEKIIESNGYITAKKVRHRLRGIFNYAVQYSYIENNEVDYTTIPQKPKTLEELEKKRNNFLTMQEIKALVDVLNRREYHQKYADMVLVLTLTGMRYGELTALQLKNIDFENNKIEITGNFDSVNKIKTLPKTTNSIRTIKVSESVIEAIQRQIVRLSERFQPLSSDDYIFCFEKWNQPTTIACFIQILKKYGKQAKIEKNLSSHIFRHSHISFLAESGLPIKSIMDRVGHSNAKMTLEIYSHTTEDMEDKLVNKLDTIF

SEQ ID NO: 4951 - protein, 61 aa, Streptococcus pneumoniae
HNFNNFTAYKHDILCQPSIYKIGHLRNSLSCHLNLCIGDTVILYFVSMLTYFAITSFLNLL

SEQ ID NO: 4952 - protein, 352 aa, Streptococcus pneumoniae
MKDDQKYLLAGLYSLLVAIFYFPLIESKGIFVSILMAVLLLYLIYFIATVIHIVIIKFIRKKSFKYLVLYPFTYDGSWRFQPINLLYFPEMVRDVIPINLVQEYCQGQPYGLLKKMLKRIRLSREISLLLATIIVYFFTHRILPLSVFTFIFSYILLFVQSYLGSNTAWIGNRRLIIDDEFEKILLSKSYIKEISSARYSEYLTCEYKNLTPIILIAIFENLLDSYLLQNQSEVDLDIFYKVLPLLYKEKYTMGFNYFVSLNYLLYKVGFLGIIYDNEALRDLSKQYLNKNISELQDGSFEGGIQDAVASKQIVVINEFIACLNSRCVPSQYDRFFYKDRPYIFSRKSPIKG

SEQ ID NO: 4953 - protein, 63 aa, Streptococcus pneumoniae
SILNIKVKPPSIYLQKSPWTQSMENKILQLEANKVPLINISDHLSFKTPYYLLRIHQYNRATL

SEQ ID NO: 4954 - protein, 70 aa, Streptococcus pneumoniae
MMIVLISVIVAFLYHKITEYVNNRKIDIVIFLSLLISHFIWNYYFLPIEILIAISGANLLLSFLKKLQTK

SEQ ID NO: 4955 - protein, 80 aa, Streptococcus pneumoniae
LYFQNLIFGGLSNEITINNTPKINKNISQTLFSVLIKLPYLSHFLFLNNSYSFSLIKGTEKLEKIIRIENRYTSFCITKT

SEQ ID NO: 4956 - protein, 148 aa, Streptococcus pneumoniae
MMYLDGGGYLSKSACQGICAALAMSPGTFIALTGAAVLTKKLINYIKVGGLGGWLIGAAAGVLALIFLIKICVDTTIKVLLNRIFKASKVMKRRIFSLFVLDLMVYIFLGYVLVIQKDVYLFSILIIFSNFSVPFIREKEYELFKNKK

SEQ ID NO: 4957 - protein, 60 aa, Streptococcus pneumoniae
TIKSSTKRENILLFITLLALKILFNRTFIVVSTQIFIKKIRANTPAAAPISQPPRPPTLI

SEQ ID NO: 4958 - protein, 116 aa, Streptococcus pneumoniae
LSISMLKKYPCTMQHDQSDCAAAVVSTVLLSYKKELSIMKIREIIGTDMYGTTVSGIVSGLNKLNFTVKAVRVALEDLTPKLTFPAILQVKNDLGQNHFVVLHSIKEKIKGTRITK

SEQ ID NO: 4959 - protein, 287 aa, Streptococcus pneumoniae
MRYDFGKVYKEIRESKGLTQEEVCGGVLSRTSLSKIESGKTTPKYENMEFLLRQINMSFEEFEYICQLYQPSQRTEIMQTYLNMRSIIGTSDLVNLFQKCQDYLKTHHDLPIEEIRDMLEVVIYLRQHGAGELSKHAEQVVKKLWKKIEKQDTWYESDLKILNTILFSFPIEYLHLITGKILQRLEVYKNYQHLYDLRMTILLNLSTLYLYNQDKNMCKQICYTLLEDAKNKKSYDRLAICYVRIGICTDDSKLIQKGFSLLELTEETSMLSHLKKEVEIYYQAKER

SEQ ID NO: 4960 - protein, 124 aa, Streptococcus pneumoniae
VFTTMCPCHHESPNDLTRKYDFYVYPNSIMTFFSKVNISHFFNDKKEATNRPTSYSEPITPSLFSFIRFLSDCNLVFDLVIPLTGTTMSNCSRSYLMRYFNQFFRNQRAAQGRYQGILLFIIGM

SEQ ID NO: 4961 - protein, 75 aa, Streptococcus pneumoniae
MVIFLLKMKHFFAGIGEINFVSYLLYICVGIAPFFHVYIIGSEMNFVKIVLSILGIIFVCILTIARIYRTFFYKE

SEQ ID NO: 4962 - protein, 126 aa, Streptococcus pneumoniae
MELVLPNNYVVIDEEEMMYLDGGGVGCNWWNSRGSFATVLDVGLAIYSGGATIYSAYAIKKAISANRGAITRTLRSLIIKHVGSAAGHLVNTALNVALTVTGFSLGGAIAYGADWADGSLDGYIFA

SEQ ID NO: 4963 - protein, 74 aa, Streptococcus pneumoniae
SFHGAGRYNVRELELLVEDKMLRVIVVIQSLVIILLAVALLLSRKNFDSLNVVLIMMIVSQLLLLVYLIKSGNQ

SEQ ID NO: 4964 - protein, 69 aa, Streptococcus pneumoniae
LLLLLTFYPPLTTQAPLHYIDQPHGKIIARLINDIIHTRIQNIFLFILFLLSLFSTYIVPLIKLISKLR

SEQ ID NO: 4965 - protein, 67 aa, Streptococcus pneumoniae
AHFKITLTFFTKRRKLCVMIMDSAFKFLNSIPSFYLYYERKYNNCQVTKVNFIKKLQAKFVKFTLSR

SEQ ID NO: 4966 - protein, 287 aa, Streptococcus pneumoniae; identical to SEQ ID NO: 4959

SEQ ID NO: 4967 - protein, 172 aa, Streptococcus pneumoniae; identical to SEQ ID NO: 2956

SEQ ID NO: 4968 - protein, 121 aa, Streptococcus pneumoniae
VKQSGRLFQPEPRNLKAKLFSQVIVRAKHIHSNDFDATSDGSIIFKKVISDDSLCSTFKNSDDIELFKILRNKAHLHLPIETVTPRTVSTSQDIILGRFLKLHSKWKSLSFRMTVEVEMES

SEQ ID NO: 4969 - protein, 95 aa, Streptococcus pneumoniae
MSFIAQDFEKLDIITVLEGRTQAVIRDHFLKYDRAVRCRVKIITMDMFSPYYDLAKQLRFQISRLRLKQSPRLFHSRMLKSFLIAFTLCNILAVL

SEQ ID NO: 4970 - protein, 255 aa, Streptococcus pneumoniae; identical to SEQ ID NO: 4700

SEQ ID NO: 4971 - protein, 156 aa, Streptococcus pneumoniae
LRMPLKRPLKNRKKEKNMSKEKVILAYSGGLDTSVAITWLKKDYDVVAVCMDVGEGKDLDFIHDKALKVGAVESYVIDVKDEFATDYVLVAHQSHAYYEQKYPLVSALSRPLISKKLVEIAHQIGATTIAHGCTGKGNDQVEYQIAVAKKANEAKK

SEQ ID NO: 4972 - protein, 265 aa, Streptococcus pneumoniae
MKKVLMTMFGLVMLPLLFACSNNQSAGIEAIKSKGKLVVALNPDFAPFEYQKVVDGKNQIVGSDIELAKAIATELGVELELSPMSFDNVLASVQSGKADLAISGVSKTDERSKVFDFSTPYYTAKNKLIVKKSDLATYQSVNDLAQKKVGAQKGSIQETMAKDLLQNSSLVSLPKNGNLITDLKSGQVDAVIFEEPVAKGFVENNPDLAIADLNFEKEQDDSYAVAMKKDSKELKEAVDKTIQKLKESGELDKLIEDAFKASIEK

SEQ ID NO: 4973 - protein, 213 aa, Streptococcus pneumoniae
MIELKNITKTIGGKVILDNLSLRIDQGDLVAIVGKSGSGKSTLLNLLGLIDGDYSGRYEIFGQTNLAVNSAKSQTIIREHISYLFQNFALIDDETVEYNLMLALKYVKLPKKDKLKKVEEILERVGLSATLHQRVSELSGGEQQRIAVARAILKPSQLILADEPTGSLDPENRDLVLKFLLEMNREGKTVIIVTHDAYVAQQCHRVIELGEGK

SEQ ID NO: 4974 - protein, 58 aa, Streptococcus pneumoniae
MTVFPSRFISKRNFKTKSLFSGSSEPVGSSAKISWLGFKMALATAIRCCSPPDNSETL

SEQ ID NO: 4975 - protein, 438 aa, Streptococcus pneumoniae
LIINPKDLFPILWLSHFLLLQLYLFISWLTYLLIQKMTISSLLKGFSSFKFGLIFNYVMKIGTTILLTALLIGVGRSLEQENKELAYQQQWVSQGNYLTLETFKLNDNLWQEELAGSGKSTDYFYRFYQDLVEKTQAGYVQSSSLPVKNFVQSEQIQQYQLTDTVDVYYANRNFLKSKGFKLPDTGIKKVILMPASTKGEEDKNQLLGKLIAFHSMKYEEQQKRTIEEMDVEIAYYEGDWSFFPYSDKRKENLSNPIISLVNDSDMMWDEKASLSTTGLNNPIKIENTVQHQKEITELVEKLSDGNYLKFSSIQAIQQEKVDSYRDAVRNFNLLFALFGLLSMMISYFLLVTTFLLKRRDIITKKFMGWKLVDRYRPLLVLLLLGYSFPLLVLIFFAHAFLPLLLFAGFTCLDILFVLGLASRMEKRSLVELLKGGIL

SEQ ID NO: 4976 - protein, 370 aa, Streptococcus pneumoniae
LERENCSGGTFMKKISNFCMLLLLLCTTFFVFNVNYTREVVRIQEMGKTVDSLDLYLKDINEPAASVLRFFEDVSKEYKVSIIKTDSGDEVVKSGVFDKDTFPYQEFGISSLDFTTDGEGVYSNKEISNKLGTIPTFLKAKPIQLMTFQTYIKDTSRSLNGRYTITSTQEMDKDRIVQKWSDFFKIDQATLLEPTYKSAVEVINRDLLLSAIVFVLAILLLVLVTVYQPMMEMKRVGVQKLLGFQDRAVLADVVKGNLYLLLGGALVINLGVFFLLDYKPKRFVSYTVVVSFFAVAALSLYQLVDLPLNPKNDNQLSAERFFIFQIWSYLQLCDENRDNYFTDGLTDWGGQKFRTRKQRTCLSATVGKSR

SEQ ID NO: 4977 - protein, 71 aa, Streptococcus pneumoniae
LNILITYILLDIIQQLLDMGVEPLRIMQNLRHGLELPSPRFRQQEWNISMDLSKILPSPIWRGKTVVEALL

SEQ ID NO: 4978 - protein, 83 aa, Streptococcus pneumoniae
MECGILENTNALTVWVEGGQWNYGVGWTGTFEYSDYLHSTRYHTATVRHGGRTSKDYAKPEAWARASLTKIPPTGMEYFYGFE

SEQ ID NO: 4979 - protein, 287 aa, Streptococcus pneumoniae; identical to SEQ ID NO: 4959

SEQ ID NO: 4980 - protein, 195 aa, Streptococcus pneumoniae
MKSITKKIKATLAGVAALFAVFAPSFVSAQESSTYTVKEGDTLSEIAETHNTTVEKLAENNHIDNIHLIYVDQELVIDGPVAPVATPAPATYAAPAAQDETVSAPVAETPVVSETVVSTVSGSEAEAKEWIAQKESGGSYTATNGRYIGRYQLTDSYLNGDYSAENQERVADAYVAGRYGSWTAAKNFWLNNGWY

SEQ ID NO: 4981 - protein, 96 aa, Streptococcus pneumoniae
ADTNDGANTANKAATPARVALIFLVIDFIFENSPSFYSSIIPFKYYRFLTLLCRNITKLFFISLNKVFFVIKDTIFMLFEVLERFSSTIKAKPLIL

SEQ ID NO: 4982 - protein, 223 aa, Streptococcus pneumoniae
MKSLRFQSVFDIIGPVMIGPSSSHTAGAVRIGKIVSSIFDDTPTEVEFQLFNSFAKTYRGHGTDLALVAGILGMDTDDPEIPNSLEIAHKRGIKIVWTIQKDSNAPHPNTTKITVKNAHKTISVTGISIGGGNIQVTELNGFAVSLNMNTPTIIIVHQDIPGMIALVTEALSRYGINIAQMNVTREKAGEKAIMIIEVDSRNCDEAIEEIRKIPHLHNVNFFK

SEQ ID NO: 4983 - protein, 290 aa, Streptococcus pneumoniae
MFYSIKELVEQADLDFQGNVAELMITTEFELTGREREEVFLLMERNLEVMKASVQLGLNENKSRSGLTGGDAAKLDHYIKNEKTLSDYTILSAARNAIAVNEHNAKMGLVCATPTAGSAGCLPSVLTAAIEKLDLSHEQQLDFLFAAGAFGLVIANNASISGAEGGCQAEVGSASAMSAAALTLAAGGTPYQASQAIAFVIKNMLGLICDPVAGLVEVPCVKRNAMGASFAFIAADMALAGIESKIPVDEVIDAMYQVGASMPTAFRETAEGGLATTPTGRRLQKEIFGE

SEQ ID NO: 4984 - protein, 177 aa, Streptococcus pneumoniae
LSFIDAFCLIVRTIYLHGFRNLVFGQAGRKTTFERWSHKTTNSFGIRARHPQLFKGIGKGIVNPDRTINEGSIQIEKNRCDRGHGFSYLISLFSENFFLEATTSRGGSESTFSCFTKGSWHACSYLVHGIDHFIHRDFRFDTCQGHVCCDESKASSHGITFDTGNFDQTCNRVTDEA

SEQ ID NO: 4985 - protein, 210 aa, Streptococcus pneumoniae
MTSITAIFFDLDGTLVDSSIGIHNAFTYTFKELGVPSPDAKTIRGFMGPPLESSFATCLSKDQISEAVQIYRSYYKAKGIYEAQLFPQIIDLLEELSSSYPLYITTTKDTSTAQDMAKNLEIHHFFDGIYGSSPEAPHKADVIHQALQTHQLAPEQAIIIGDTKFDMLGARETGIQKLAITWGFGEQADLLNYQPDYIAHKPLEVLAYFQ

SEQ ID NO: 4986 - protein, 71 aa, Streptococcus pneumoniae
QTRKLAAGCSKHCFKVVDGTDEVSSKHCFEVVDRTDEVSNHTYGKATLTWFEEIFEEYKSLHNKTHITKVV

SEQ ID NO: 4987 - protein, 616 aa, Streptococcus pneumoniae
MNKKLTDYVIDLVEILNKQQKQVFWGIFDIFSMVVSIIVSYILFYGLINPAPVDYIIYTSLAFLFYQLMIGFWGLNASISRYSKITDFMKIFFGVTASSVLSYSICYAFLPLFSIRFIILFILLSTFLILLPRITWQLIYSRRKKGSGDGEHRRTFLIGAGDGGALFMDSYQHPTSELELVGILDKDSKKKGQKLGGIPVLGSYDNLPELAKRHQIERVIVAIPSLDPSEYERILQMCNKLGVKCYKMPKVETVVQGLHQAGTGFQKIDITDLLGRQEIRLDESRLGAELTGKTILVTGAGGSIGSEICRQVSRFNPERIVLLGHGENSIYLVYHELIRKFQGIDYVPVIADIQDYDRLLQVFEQYKPAIVYHAAAHKHVPMMERNPKEAFKNNIRGTYNVARAVDEAKVSKMVMISTDKAVNPPNVMGATKRVAELIVTGFNQRSQSTYCAVRFGNVLGSRGSVIPVFERQIAEGGPVTVTDFRMTRYFMTIPEASRLVIHAGAYAKDGEVFILDMGKPVKIYDLAKKMVLLSGHTESEIPIVEVGIRPGEKLYEELLVSTELVDNQVMDKIFVGKVNVMPLESINQKIGEFRTLSGDELKQAIIAFANQTTHIE

SEQ ID NO: 4988 - protein, 83 aa, Streptococcus pneumoniae
HHLLGQVINLDWFAHIKDKDFPIFGISTSMDNQTTSFWNGHKVTGHAEVCHRYRPTFSNLTFKDWNDTTTATKNIPKTNCTVG

SEQ ID NO: 4989 - protein, 391 aa, Streptococcus pneumoniae
GFFTIMSSKVSGFQDKNGKVLKIMIEWWKEKFRRVVVTQNVESLLVSIVISACNEEKYLPGLIEDLKNQTYPKENIEILFINAMSTDGTTAIIQQFIKEDTEFNSIRLYNNPKKNQASGFNLGVKHSVGDLILKIDAHSKVTESFVMNNVAIIQQGEFVCGGPRPTIVEGKGKWAETLHLVEENMFGSSIANYRNSSEDRYVSSIFHGMYKREVFQKVGLVNEQLGRTEDNDIHYRIREHGYKIRYSPSILSYQYIRPTFKKMLHQKYSNGLWIGLTSHVQFKCLSLFHYVPCLFVLSLVFSLALLPITFVFITLLLGAYFLLLSLLTLLTLLKHKNGFLIVMPFLLFSIHFAYGLGTIVGLIRGFKWKKEYKRTIIYLDKISQINQNMLQ

SEQ ID NO: 4990 - protein, 101 aa, Streptococcus pneumoniae
LGVSFELPFLVYPFFLGNISQVLEVKVSSLGGFDQLASPYVYPLFTIFYPTGSENRLGASLHLQPLLLDHRLTYSTNQSAPALSRNLDGWGKCRSHQCPAS

SEQ ID NO: 4991 - protein, 248 aa, Streptococcus pneumoniae
LVVLTSLPLLMFTLFSPFSTQLAQKIGLEHLFTYSLFFLTIGSLIRLINLPLLYLGTLMVGASVAVINVLLPSLIQANQPKKIGFLTTLYVTSMGIATALASYLAVPITQASSWKGLILLLTLLCLATFLVWLPNHRYNHRLAPQTKQKSQIKVMRNKQVWATIILAGFQSLMFYTVMTWLPPMSIHAGLSSVEVGSMTSILSNDKHSFYNDHPKPGNQFIDSQPSAHAHSGFTSWCGRHLHALFPNQ

SEQ ID NO: 4992 - protein, 142 aa, Streptococcus pneumoniae
MISIPFTMTIPSLATSLSTRNRQLMLTLVSLAGVVGICMLFFPINNFIYWLAIHLLMGTATSALFPYLMVNFSLKTSAPEKTAQLSGLSQTGGYILAAFGPTLFGYSFDLFHSWVPAVAALLLIDILMTVALFTVDRADKIL

SEQ ID NO: 4993 - protein, 108 aa, Streptococcus pneumoniae
MYFPTSSALIEFLILAVLEQGDSYGYEISQTIKLIANIKESTLYPILKKLEGNSFLTTYSREFQGRMRKYYSLTNGGIEQLLTLKDEWTLYTDTINGIIEGSIRHDKN

SEQ ID NO: 4994 - protein, 197 aa, Streptococcus pneumoniae
MTRTEYLTQLELYLKKLPEADRIEAMDYFRELFDDAGVEGEEELIASLGTPKEVAHEVLSNLLDKKINEAPAQKNNRQILHIALLALLAAPIGIPLGIAILVTLFAILVAALTVILAFFAVSILGIIGGFLFLVESFTVLAQAKSAFILIFGSGLLAIGASSLVLLGISYVARFFGLLIVRLVQFVLKKGKRGNQHA

SEQ ID NO: 4995 - protein, 303 aa, Streptococcus pneumoniae
MRKWTKGFLIFGVVTTVIGFILLFVGIQSDGIKSLLSMSKEPVYDSRTEKLTFGKEVENLEITLHQHALTITDSFDDQIHISYHPSLSAHHDLITNQNDRTLSLTDKKLSETPFLSSGIGGILHIASSYSSRFEEVILQLPKGRTLKGINISANRGQTTIINASLENATLNTNSYILRIEGSRIKNSKLTTPNIVNIFDTVLTDSQLESTENHFHAENIQVHGKVELTAKDYLRIILDQKESQRINWDISSNYGSIFQFTREKPESRGTELSNPYKTEKTDVKDQLIARSDDNIDLISTPSRR

SEQ ID NO: 4996 - protein, 122 aa, Streptococcus pneumoniae
LLRKSFLALFSYSDFFCFFRKVWLFFSRIRCLLFFYFCSRFTDFRSFNFLFLLAFQFDFSLRDFLLYLSIFSNWCIEIGYRFFSLVCNLLSLLFRLVLACCFYKIITFKPFLFHGRTSFLVR

SEQ ID NO: 4997 - protein, 354 aa, Streptococcus pneumoniae
MKQEWFESNDFVKTTSKNKPEEQAQEVADKAEETIADLDTPIGKNTQVEEEVSQAEVELESQQEEKIETPEVGEARTEIEEKKASNSTEEEPDLSKETEKVTIAEESQEALPQQKATTKEPLLISKSLESPYIPDQAPKSRDKWKEQVLDFWSWLVEAIKSPTSKLETSITHSYTAFLLLILFSASSFFFSIYHIKHAYYGHIASINSRFPEQLAPLTLFSIISILVATTLFFFSFLLGSFVVRRFIHQEKYWTLDKVLQQYSQLLAIPIFLTAIASFFAFFDSLRFTALLCVISIGIILLASLHIITRPSQASETDSFYQLFLSVLVNGVIILLFFVAEVALIGDYLRILAFL

SEQ ID NO: 4998 - protein, 317 aa, Streptococcus pneumoniae
LKRFSKSIKFVFVSFRKIRYTVCKRFQRSPVMAKTFFIPNKQSILGEQEILNAKSILALLDGLESHSYDVVYLRQPLNRLEYIECAIVGQSQFLFKVSYADGQKAYRVDLPDLLTKTDWQIIKSFLDALLAYTGTDIEGLDGFDFEAYFQASIQAYLADAVARFTICQGIFNPIFFSRENLKSFLEADGLAQFEARVRAVQETDAYFARVSFYQDGEGKVHGVYHLAQGVKTVLPREPFVPAAYIEQLVDKEVQWEIDLVQITGDGSKPEDYESIARLDYAKFLEVLPPSFYHQLDANQIEIQPILGQDFKTLAQEK

SEQ ID NO: 4999 - protein, 328 aa, Streptococcus pneumoniae
MAKDIRVLLYYLYTPIENAEQFAADHLAFCKSIGLKGRILVADEGINGTVSGDYETTQKYMDYVHSLPGMEDLWFKIDEESEQAFKKMFVRYKKEIVHLGLEDNDFDNDINPLETTGAYLSPKEFKEALLDKDTVVLDTRNDYEYDLGHFRGAIRPDIRNFRELPQWVRDNKEKFMDKRVVVYCTGGVRCEKFSGWMVREGYKDVGQLHGGIATYGKDPEVQGELWDGKMYVFDERIAVDVNHVNPTIVGKDWFDGTPCERYVNCGNPFCNRRILTSEENEDKYLRGCSHECRVHPRNRYVSKNELTQAEVIERLAAIGESLDQAATV

SEQ ID NO: 5000 - protein, 68 aa, Streptococcus pneumoniae
MFSLVLILTIQEISRTLYNFQSNKLHSFSQAGILVWINKKFRKFKNRKENKSYGKRYSCLTLLPLYSN

SEQ ID NO: 5001 - protein, 514 aa, Streptococcus pneumoniae
LIFIEYKIITLFISLKIKKGVFIMKNWKKYAFASASVVALAAGLAACGNLTGNSKKAADSGDKPVIKMYQIGDKPDNLDELLANANKIIEEKVGAKLDIQYLGWGDYGKKMSVITSSGENYDIAFADNYIVNAQKGAYADLTELYKKEGKDLYKALDPAYIKGNTVNGKIYAVPVAANVASSQNFAFNGTLLAKYGIDISGVTSYETLEPVLKQIKEKAPDVVPFAIGKVFIPSDNFDYPVANGLPFVIDLEGDTTKVVNRYEVPRFKEHLKTLHKFYEAGYIPKDVATSDTSFDLQQDTWFVREETVGPADYGNSLLSRVANKDIQIKPITNFIKKNQTTQVANFVISNNSKNKEKSMEILNLLNTNPELLNGLVYGPEGKNWEKIEGKENRVRVLDGYKGNTHMGGWNTGNNWILYINENVTDQQIENSKKELAEAKESPALGFIFNTDNVKSEISAIANTMQQFDTAINTGTVDPDKAIPELMEKLKSEGAYEKVLNEMQKQYDEFLKNKK

SEQ ID NO: 5002 - protein, 133 aa, Streptococcus pneumoniae
LAPTFSSMILLAFANNSSKLSGLSPIWYILITGLSPESAAFLLLPVKFPQAARPAARATTLADAKAYFFQFFMIKTPFFIFKLINNVMILYSMKIKEQTRKLAAGCSKHCFEVVDKTDEVSYIYLRQGDVDTV

SEQ ID NO: 5003 - protein, 307 aa, Streptococcus pneumoniae
MAKKKIKKEKIDNVGIHSFSKKADIFFSIISGLIALSCILPFVFVIIISVTDEKSLLQYGYSFFPSQFGLDGFEFLAQFKDKILQALFISVFVTVVGTLTNVFITTTYAYAISRTTFKYRRFFTIFVLLSMLFNAGLVPGYIMVTRVLQLGDTVWALIVPMLLSPFNIILMRSFFKKTIPEAILESARIDGASEARIFFQICLPLSLPGIATITLLTALGFWNDWFNALLYIKSDNLYPLQYLLMQIQQNMDYIAKAVGLTGQLGVALPKETGRMAMVVVATLPIAILYPFFQRYFVKGLTIGGVKE

SEQ ID NO: 5004 - protein, 319 aa, Streptococcus pneumoniae
MDIKIKREEIMKKFSKTLRDNWIFLLMVLPGALWLILFFYIPVFGNVVAFKDYHMTSNGFIDSIINSKWVGLDNFRFLFSSRDAFIITRNTVLYNLGFIFLGLVVSVGIAIILSELRSKRMVKIFQTSMLFPYFLSWVIISFFTDAFLNIDKGVFNHLLESLGLKEVNFYADLGIWPYLLLFLGIWKGFGYSSVMYYATIMGIDPTYYEAATVDGASKWQRIRNVTIPQLTPLVTVLTILAVGNIFRADFGLFYQIPHNAGQLYNVTNVLDVYVFNGLTQTADIGMAAAAGLYQSVVGLILVILSNLLARRVDPNSALF

SEQ ID NO: 5005 - protein, 69 aa, Streptococcus pneumoniae
CNRYQKSKKEFLDGYQNKKGGNYEKVFKNIERQLDLSLDGFARGTLVDSILLHSSIWERGCLQRLPHDQ

SEQ ID NO: 5006 - protein, 119 aa, Streptococcus pneumoniae
LRSLTGVSNLTTDSARLVLAEAKKAFADDSLTEQGLRDILQTVKDAIASLESIKESQSATKDGGQTAGKETADKDVLENSQEELQKAVLFLADEKGSEHTEAELIDNLKEVIAKLKANA

SEQ ID NO: 5007 - protein, 115 aa, Streptococcus pneumoniae; identical to SEQ ID NO: 4727

SEQ ID NO: 5008 - protein, 176 aa, Streptococcus pneumoniae
MSRYTGPSWKQARRLGLSLTGTGKELARRKYVPGQHGPNNRSKLSEYGLQLAEKQKLRFTYGVGEKQFRNLFVQATKIKGGILGFNFMLLLERRLDNVVYRLGLATTRRQARQFVNHGHILVDGKRVDIPSYRVTPGQVISVREKSLKVPAILEAVEATLDVQHSYHSTLKNWKVH

SEQ ID NO: 5009 - protein, 358 aa, Streptococcus pneumoniae
DRETERTNMKLKSYILVGYIISTLLTILVVFWAVQKMLIAKGEIYFLLGMTIVASLVGAGISLFLLLPVFTSLGKLKEHAKRVSAKDFPSNLEVQGPVKFQQLGQTFNEMSHDLQVSFDSLEESEREKGLMIAQLSHDIKTPITSIQATVEGILDGIIKESEQAHYLATIGRQTERLNKLVEELNFLTLNTARNQVETTSKDSIFLDKLLIECMSEFQFLIEQERRDVHLQVIPESARIEGDYAKLSRILVNLVDNAFKYSAPGTKLEVVTKLEKGQLSISVTDEGQGIAPEDLENIFKRLYRVETSRNMKTGGHGLGLAIARELAHQLGGEITVSSQYGLGSTFTLVLNLSGSENKA

SEQ ID NO: 5010 - protein, 232 aa, Streptococcus pneumoniae
MGKTILLVDDEVEITDIHQRYLIQAGYQVLVAHDGLEALELFKKKPIDLIITDVMMPRMDGYDLISEVQYLSPEQPFLFITAKTSEQDKIYGLSLGADDFIAKPFSPRELVLRVHNILRRLHRGGETELISLGNLKMNHSSHEVQIGEEMLDLTVKSFELLWILASNPERVFSKTDLYEKIWKEDYVDDTNTLNVHIHALRQELAKYSSDQTPTIKTVWGLGYKIEKPRGQT

SEQ ID NO: 5011 - protein, 123 aa, Streptococcus pneumoniae
LDNIVATKKVTIKINVKETSDTANGSLSPSNSGSGVTPMNHNHATGTTDSMPADTMTSSTNTMAGENMAASANKMSDTMMSEDKAMLPNTGETQTSMASIGFLGLALAGLLGGLGLKNKKEEN

SEQ ID NO: 5012 - protein, 890 aa, Streptococcus pneumoniae
MKFNPNQRYTRWSIRRLSVGVASVVVASGFFVLVGQPSSVRADVVNPTPGQVLPEETSGTKEGDLSEKPGDTVLTQAKPEGVTGNTNSLPTPTERTEVSEETNSSSLDTLFEKDEEAQKNPELTDVLKETVDTADVDGTQASPAETTPEQVKGGVKENTKDSIDVPAAYLEKAEGKGPFTAGVNQVIPYELFAGDGMLTRLLLKASDNAPWSDNGTAKNPALPPLEGLTKGKYFYEVDLNGNTVGKQGQALIDQLRANGTQTYKATVKVYGNKDGKADLTNLVATKNVDININGLVAKETVEKAVADNVKDSIDVPAAYLEKAKGEGPFTAGVNHVIPYELFAGDGMLTRLLLKASDKAPWSDNGDAKNPALSPLGENVKTKGQYFYQVALDGNVAGKEKQALIDQFRANGTQTYSATVNVYGNKDGKPDLDNIVATKKVTININGLISKETVQKAVADNVKDSIDVPAAYLEKAKGEGPFTAGVNHVIPYELFAGDGMLTRLLLKASDKAPWSDNGDAKNPALSPLGENVKTKGQYFYQVALDGNVAGKEKQALIDQFRANGTQTYSATVNVYGNKDGKPDLDNIVATKKVTININGLISKETVQKAVADNVKDSIDVPAAYLEKAKGEGPFTAGVNHVIPYELFAGDGMLTRLLLKASDKAPWSDNGDAKNPALSPLGENVKTKGQYFYQVALDGNVAGKEKQALIDQFRANGTQTYSATVNVYGNKDGKPDLDNIVATKKVTININGLISKETVQKAVADNVKDSIDVPAAYLEKAKGEGPFTAGVNHVIPYELFAGDGMLTRLLLKASDKAPWSDNGDAKNPALSPLGENVKTKGQYFYQLALDGNVAGKEKQALIDQFRANGTQTYSATVNVYGNKDVNQTWTTS

SEQ ID NO: 5013 - protein, 189 aa, Streptococcus pneumoniae
LIDDIGQFAIWQDRMFGQTAQHGLTNSLKDFWIFLLNIGPQLAFFCQMLRCSRSVEQGTGNHRRDFNMIQQIFSHFGMTHLGQIKLVYQESIDLELLVNALNHHLLIDRLVLTPNQITIEIDRQIVHGLDLLKGRKDKEIIDIKSMFRQLELASTQQICPINQRVHHGILAFGEISDLVPAKNLPNRQD

SEQ ID NO: 5014 - protein, 136 aa, Streptococcus pneumoniae
MYYLPVDFYRYLIGREDQSVNEQVMIKCIDQQLKVNRLLVDQLDLSQVSHPKMREYLLNHIEITTVISSTLLNRSGTTEHLAKKRQLWTYIQQKNPEVFQAIRKTMLSRLTKHSVLPDRKLSNVVYQITKSVYGFN

SEQ ID NO: 5015 - protein, 179 aa, Streptococcus pneumoniae
MKLLSIAIPSYNAAAYLHYCVESLVIGGEQVGILIINDGSQDQTQEIAECLASKYPNIVRAIYQENKCHGGAVNRGLAEASGRYFKVVDSDDWVDPRAYLKILETLQELESKGQEVDVFVTNFVYEKEGQSRKKSMSYDSVLPVRQIFGWDQVGNFSKGQYTMMHSLIYRTDLLRASQF

SEQ ID NO: 5016 - protein, 221 aa, Streptococcus pneumoniae
MSDRTIGILGLGIFGSSVLAALAKQDMNIIAIDDHAERINQFEPVLARGVIGDITDEELLRSAGIDTCDTVVVATGENLESSVLAVMHCKSLGVPTVIAKVKSQTAKKVLEKIGADSVISPEYEMGQSLAQTILFHNSVDVFQLDKNVSIVEMKIPQSWAGQSLSKLDLRGKYNLNILGFREQENSPLDVEFGPDDLLKADTYILAVINNQYLDTLVALNS

SEQ ID NO: 5017 - protein, 459 aa, Streptococcus pneumoniae
MLFKLSKEKIELGLSRLSPARRIFLSFALVILLGSLLLSLPFVQVESSRATYFDHLFTAVSAVCVTGLSTLPVAHTYNIWGQIICLLLIQIGGLGLMTFIGVFYIQSKQKLSLRSRATIQDSFSYGETRSLRKFVYSIFLTTFLVESLGAILLSFRLIPQLGWGRGLFSSIFLAISAFCNAGFDNLGSTSLFAFQTDLLVNLVIAGLIITGGLGFMVWFDLAGHVGRKKKGRLHFHTKLVLLLTIGLLLFGTATTLFLEWNNAGTIGNLPVADKVLVSFFQTVTMRTAGFSTIDYTQAHPVTLLIYILQMFLGGAPGGTAGGLKITTFFVLLVFARSELLGLPHANVARRTIAPRTVQKSFSVFIIFLMSFLIGLILLGITAKGNPPFIHLIFETISALSTVGVTANLTPDLGKLALSVIMPLMFMGRIGPLTLFVSLADYHPEKKDMIHYMKADISIG

SEQ ID NO: 5018 - protein, 61 aa, Streptococcus pneumoniae
MLLTSSVLSATSKQCFELTSSVLSTTSKQCFEQPVTSFLSDALVLIAYNQKEKFSPEKHIE

SEQ ID NO: 5019 - protein, 254 aa, Streptococcus pneumoniae
MIQKHAIPILEFDDNPQAVIMPNHEGLDLQLPKKCVYAFLGEEIDRYAREVGADCVGEFVSATKTYPVYVINYKGEEVCLAQAPVGSAPAAQFMDWLIGYGVEQIISTGTCGVLADIEENAFLVPVRALRDEGASYHYVAPCRYMEMQPEAIAAIEEVLEDRGIPYEEVMTWTTDGFYRETAEKVAYRKEEGCAVVEMECSALAAVAQLRGVLWGELLFTADSLADLDQYDSRDWGSEAFNKALELSLASVHHL

SEQ ID NO: 5020 - protein, 62 aa, Streptococcus pneumoniae
QSVKEETDELDKKQAYIVSCHSGLRSYIAEPILKQAGFTAQNLDGAYSLYKMVNPEGVEYGN

SEQ ID NO: 5021 - protein, 98 aa, Streptococcus pneumoniae
METSISMADFYGKYQNENLELIDVREAHEFQAGHAPGAKNLPLSTLEQGYKELKPDHEYYVICQGGVRSASTCQFLSSQGLTVTNVEGGMNAWPGQVE

SEQ ID NO: 5022 - protein, 120 aa, Streptococcus pneumoniae
MKIKVQTRKLAAGCSKHCFKVVDGTDEVSSKHCFEVVDRTDEVSNHIYGKVKLTWFEEIFEEYKSLHNKTHITKVLMNCTPKVRQKKSNFWGSVHSTPDTMRFFNFKDFLQLLLTHIKLF

SEQ ID NO: 5023 - protein, 97 aa, Streptococcus pneumoniae
RYNEEKSSKEKELTNSKYITCLKRSEGQLCGIQKMIEGDRDCADIVTQLTAVKSSVERVIEMIITENLTECINQPLDDSEAQKERLEKAIRYLIKRK

SEQ ID NO: 5024 - protein, 81 aa, Streptococcus pneumoniae
LGERVEPVILAEGTRMGHIHLSVKDSRKSSQFYQKVLGLENKFSVPGASWIAAGDYHHHLAVNEWGGKGLASRKQGLPGLA

SEQ ID NO: 5025 - protein, 131 aa, Streptococcus pneumoniae
MTYEYKSHIYLAETALNVKDLASQTAFYQQVIGLEILSQTETESILGLGGKVLVQLIQAQESGEVREYYGLYHLAILLPTRKALADVLKHLTDLQIPLVGGADHGYSEAIYLEDLEGNGIELYRDKPFSTW

SEQ ID NO: 5026 - protein, 345 aa, Streptococcus pneumoniae
MKAYTERVFGNVEGEDVLAYRFETDGGYQLEVMTYGATILRYVAPDKAGNFANVILGFDDFDSYVGNSPKHGASVGPVAGRIAGATFELNGKTYDLEVNNASNCNHSGSTGWDSSLFEVEEVSDHGLTLYTERTDGTGGFPGNLKIWISYHLEETGAYEISYKVTTDQDTLVNPTNHSYFNLSGDFTQTIDRHVFQLNTEGIYSIAPDGVPAKTPEANRDVVKHVYNGTLLKDIFAEEDEQIQLASGLDHPFALPAGHDNAGFLYDQNSGRFLLFKTEAPCFVVYTANFVDESVIIGGQPMLQHNGIALEAQALPDAIHSDLKGQVILKAGQTFTSKTRYELVVK

SEQ ID NO: 5027 - protein, 152 aa, Streptococcus pneumoniae
VITVASIINLKVIGLTIELKGRTCNTTRYRTYTCSMLGTIAYITIKVIKSQDNIGKISSLVRCDIAQDSRTISHNLKLVATVCLKSIGQDILTLNISKYTLCVCFHSVLLLLFLSSKQTIESVLTIYGLSDNLQILLSRIHKHCLTFDIREL

SEQ ID NO: 5028 - protein, 388 aa, Streptococcus pneumoniae
MLHYTKEDLLELGAEITTREIYQQPDVWREAFEFYQAKREEIAAFLQEIADKHDYIKVILTGAGTSAYVGDTLLPYFKEVYDERKWNFNAIATTDIVANPATYLKKDVATVLVSFARSGNSPESVATVDLAKSLVDELYQVTITCAADGKLALQAHGDDRNLLLLQPAVSNDAGFAMTSSFTSMMLTTLLVFDPTEFAVKSERFEVVSSLARKVLDKAEDVKELVDLDFNRVIYLGAGPFFGLAHEAQLKILELTAGQVATMYESPVGFRHGPKSLINENTVVLVFGTRTDYTRKYDLDLVREVAGDQIARRVVLLSDQAFGLENVKEVALGCGGVLNDIYRVFPYIVYAQLFALLTSLKVENKPDTPSPTGTVNRVVQGVIIHEYQK

SEQ ID NO: 5029 - protein, 82 aa, Streptococcus pneumoniae
LRQSYPATSKQCFEQPAASFLQILVGTRFNSCDNVKIVRAFYIEYTWEWSLLPFPYLIEKEELNATLYKRRLARIGCRNHYA

SEQ ID NO: 5030 - protein, 134 aa, Streptococcus pneumoniae
MTKSLILVSHGRFCEELRGSTEMIMGLQDNIYTVALLPEDGPEEFTAKFEAVIEGLDDFLVFADLLGGTPCNVVSRLIMEGRDIDLYAGMNLPMVIEFINASLTGADADYKSRAAESIVKVNDLLAGFDDDEDE

SEQ ID NO: 5031 - protein, 276 aa, Streptococcus pneumoniae
VGKSKMTNSNYKLTKEDFNQINKRSLFTFQLGWNYERMQASGYLYMILPQLRKMYGDGTPELKEMMKVHTQFFNTSPFFHTIIAGFDLAMEEKDGVGSKDAVNGIKTGLMGPFAPLGDTIFGSLVPAIMGSVAATMAIAGQPWGIFLWIAVAVAYDIFRWKQLEFAYKEGVNLINNMQSTLTALIDAASVLGVFMMGALVATVINFEISYKLPIGEKMIDFQDILNQIFPRLLPAIFTAFIFWLLGKKGMNSTKAIGIIIVLALALSALGHFALGM

SEQ ID NO: 5032 - protein, 301 aa, Streptococcus pneumoniae
MIQWWQILLLTLYSAYQICDELTIVSSAGSPVFAGFITGLIMGDVTTGLLIGGNLQLFVLGVGTFGGASRIDATSGAVLATAFSVSQGIDAPLAITTIAVPVAALLTYFDVLGRMTTTFFAHRVDAAIERFDYKGIERNYLLGAIPWALSRALPVFFALAFGGAFVQSVVDFVEAYKWVADGLTLAGRMLPGLGFAILLRYLPVKRNLHYLAMGFGLTAMLTVLYSYVTGLGGAVAGIVGTLPAEVAEKIGFVNNFKGLSMIGISIVGIFLAVLHFKNSQKVAVAAPSTPSESGEIEDDEF

SEQ ID NO: 5033 - protein, 158 aa, Streptococcus pneumoniae
MTIVGCRIDGRLIHGQVANLWAGKLNVSRIMVVDDEVVNNDIEKSGLKLATPPGVKLSILPVEKAAANILAGKYDSQRLFIVARKPDRFLGLVEAGVPLETLNVGNMSQTPETRSITRSINVVDKDVEDFHKLAEKGVKLTAQMVPNDPISDFLSLLK

SEQ ID NO: 5034 - protein, 508 aa, Streptococcus pneumoniae
LCVRLHLSVRNGNSVGLPAWLLTKNMRIRSSDPTYIEAVGRYYDQLLPRLVPRLLDNGGNILMMQVENEYGSYGEDKAYLRAIRQLMEECGVTCPLFTSDGPWRATLKAGTLIEEDLFVTGNFGSKAPYNFSQRQEFFDEHGKKWPLMCMEFWDGWFNRWKEPIITRDPKELADAVREVLEQGSINLYMFHGGTNFGFMNGCSARGTLDLPQVTSYDYDALLDEKRNPTAKYLAVKKMMATHFSEYPQLEPLYKESMELDAIPLVEKVSLFETLDSLSSPVESLYPQKMEELGQSYGYLLYRTETNWDAEEERLRIIDGRDRAQLYVDGQWVKTQYQTEIGEDIFYQGKKKGLSRLDILIENMGRVNYGHKFLADTQRKGIRTGVCKDLHFLLNWKHYPLPLDNPEKIDFSKGWTQGQPAFYAYDFTVEEPKDTYLDLSEFGKGVAFVNGQNLGRFWNVGPTLSLYIPHSYLKEGANRIIIFETEGQYKEEIHLTRKPTLKHIKGENL

SEQ ID NO: 5035 - protein, 130 aa, Streptococcus pneumoniae
MTRFEIRDDFYLDGKSFKILSGAIHYFRVPPEDWYHSLYNLKALGFNTVETYVAWNLHEPREGEFHFEGDLDLEKFLQIAQDLGLYAIVRPSPFICAEWEFGGLTSLALDQEHANSLIRPNIYRGSWSLL

SEQ ID NO: 5036 - protein, 238 aa, Streptococcus pneumoniae
MAIPKYQYIKDELKNKIISGQFSSGDKFYTEAELISMYDVSSITVVRALNDLAKDGYIVRQQGKGTFVSRARKHKLVEFSDIELFNAKDDKVTVLSIERGNKLVYLEKLGLRGDQFYYKIERIRESNGVVYIYHTSYIPEQYINANYPNLEYYSSIYNRFKLDYHIHMNDEHFEEINEIVFPTPEHAASVLGVDEHFPTVLQTKITKLESTGQVLEYSETYKRSDYYKIKFISCDHDH

SEQ ID NO: 5037 - protein, 1303 aa, Streptococcus pneumoniae
MKHEKQQRFSIRKYAVGAASVLIGFAFQAQTVAADGVTTTTENQPTIHTVSDSPQSSENRTEETPKAELQPETPATDKVASLPKTEEKPQEEVSSTPSDKAEVVTPTSAEKETANKKAEEASPKKEEAKEVDSKESNTDKTDKDKPAKKDEAKAEADKPETEAGKERAATVNEKLAKKKIVSIDAGRKYFSPEQLKEIIDKAKHYGYTDLHLLVGNDGLRFMLDDMSITANGKTYASDDVKRAIEKGTNDYYNDPNGNHLTESQMTDLINYAKDKGIGLIPTVNSPGHMDAILNAMKELGIQNPNFSYFGKESARTVNLDNEQAVAFTKALIDKYAAYFAKKTEIFNIGLDEYANDATDAKGWSVLQADKYYPNEGYPVKGYEKFIAYANDLARIVKSHGLKPMAFNDGIYYNSDTSFGSFDKDIIVSMWTGGWGGYDVASSKLLAEKGHQILNTNDAWYYVLGRNADGQGWYNLDQGLNGIKNTPITSVPKTEGADIPIIGGMVAAWADTPSARYSPSRLFKLMRHFANANAEYFAADYESAEQALNEVPKDLNRYTAESVAAVKEAEKAIRSLDSNLSRAQQDTIDQAIAKLQETVNNLTLTPEAQKEEEAKREVEKLAKNKVISIDAGRKYFTLNQLKRIVDKASELGYSDVHLLLGNDGLRFLLDDMTITANGKTYASDDVKKAIIEGTKAYYDDPNGTTLTQAEVTELIEYAKSKDIGLIPAINSPGHMDAMLVAMEKLGIKNPQAHFDKVSKTTMDLKNEEAMNFVKALIGKYMDFFAGKTKIFNFGTDEYANDATSAQGWYYLKWYQLYGKFAEYANTLAAMAKERGLQPMAFNDGFYYEDKDDIQFDKDVLISYWSKGWWGYNLASPQYLASKGYKFLNTNGDWYYILGQKPEDGGGFLKKAIENTGKTPFNQLASTKYPEVDLPTVGSMLSIWADRPSAEYKEEEIFELMTAFADHNKDYFRANYNALREELAKIPTNLEGYSKESLEALDAAKTALNYNLNRNKQAELDTLVANLKAALQGLKPAATHSGSLDENEVAANVETRPELITRTEEIPFEVIKKENPNLPAGQENIITAGVKGERTHYISVLTENGKTTETVLDSQVTKEVINQVVEVGAPVTHKGDESGLAPTTEVKPRLDIQEEEIPFTTVTRENPLLLKGKTQVITKGVNGHRSNFYSVSTSADGKEVKTLVNSVVAQEAVTQIVEVGTMVTHVGDENGQAAIAEEKPKLEIPSQPAPSTAPAEESKALPQDPAPVVIEKKLPETGTHDSAGLVVAGLMATLAAYGLTKRKED

SEQ ID NO: 5038 - protein, 129 aa, Streptococcus pneumoniae
MISLSCSGEKYLRPASIETIFFFASFSFTVAARSFPASVSGLSASAFASSFLAGLSLSVLSVFDSLESTSFASSFLGLASSAFLLAVSFSAEVGVTTSALSLGVELTSSCGFSSVFGRLATLSVAGVSG

SEQ ID NO: 5039 - protein, 432 aa, Streptococcus pneumoniae
MINRYSRPEMANIWSEENKYRAWLEVEILSDEAWAELGEIPKEDVALIRKKADFDIDRILEIEQETRHDVVAFTRAVSETLGEERKWVHYGLTSTDVVDTAYGYLYKQANDIIRRDLENFTNIIADKAKEHKFTIMMGRTHGVHAEPTTFGLKLATWYSEMKRNIERFEHAAAGVEAGKISGAVGNFANIPPFVEEYVCDKLGIRAQEISTQVLPRDLHAEYFAVLASIATSIERMATEIRGLQKSEQREVEEFFAKGQKGSSAMPHKRNPIGSENMTGLARVIRGHMITAYENVALWHERDISHSSAERIITPDTTILIDYMLNRFGNIVKNLTVFPENMIRNMNSTFGLIFSQRAMLTLIEKGMTREQAYDLVQPKTAYSWDNQVDFKPLLEADSEVTSRLTQEEIDEIFNPVYYTKRVDDIFERLGLGD

SEQ ID NO: 5040 - protein, 75 aa, Streptococcus pneumoniae
MIQIIVNTFIEKDRTGAVVEVLYASADQDKVQAKYEELAAQYPENYLAIYDVPLDTDLNTLDHYPSVFIEKEEFE

SEQ ID NO: 5041 - protein, 383 aa, Streptococcus pneumoniae
LRMHLPTLLKNKEKSQRSRQMSSSKTIGIIGGGQLGQMMAISAIYMGHKVIALDPAADCPASRVAEIIVAPYNDVDALRQLADRCDVLTYEFENVDADGLDAVIKDGQLPQGTDLLRISQNRIFEKDFLSNKAQVTVAPYKVVTSSLDLADIDLSKNYVLKTATGGYDGHGQKVIRSEADLEAAYALADSADCVLEEFVNFDLEISVIVSGNGKEVTFFPVQENIHRNNILSKTIVPARISESLVDKAKAMAVRIAEQLNLSGTLCVEMFATDDDVIVNEIAPRPHNSGHYSIEACDFSQFDTHILGVLGAPLPVIKLHAPAVMLNVLGQHVEAAEQYVTENSSAHLHMYGKIEAKHNRKMGHVTLFSDVPDSVDELGEGIDF

SEQ ID NO: 5042 - protein, 154 aa, Streptococcus pneumoniae
MGSKSDWATMQKTAEVLDRFGVAYEKKVVSAHRTPDLMFKHAEEARSRGIKIIIAGAGGAAHLPGMVAAKTTLPVIGVPVKSRALSGVDSLYSIVQMPGGVPVATMAIGEAGATNAALFALRLLSVEDKSIADALANFAEEQGKIAEESSNELI

SEQ ID NO: 5043 - protein, 420 aa, Streptococcus pneumoniae
MKLLVVGSGGREHAIAKKLLESKDVEKVFVAPGNDGMTLDGLELVNISISEHSKLIDFAKTNDVAWTFIGPDDALAAGIVDDFNQAGLKAFGPTRAAAELEWSKDFAKEIMVKYGVPTAIYGTFSDFEEAKAYIEKHGAPIVVKADGLALGKGVVVAETVEQAVEAAHEMLLDNKFGDSGARVVIEEFLEGEEFSLFAFVNGDKFYIMPTAQDHKRAYDGDKGPNTGGMGAYAPVPHLPQSVVDTAVDTIVKPVLEGVIKEGRPYLGVLYAGLILTADGPKVIEFNARFGDPETQLILPRLTSDFAQNITDILDSKEPNITWTDKGVTLGVVVASKGYPLDYSKGVELPVKTDGDIITYYAGAKFAENSRALLSNGGRVYMLVTTADTVKEAQASIYQELSQQKIEGLFYRTDIGSKAIK

SEQ ID NO: 5044 - protein, 226 aa, Streptococcus pneumoniae
LASSKSENVPYIAVGTPYLTMISLAKSLDHSSSAAALVGPKALSPAWLKSSTMPAARASSGPIKVQATSLVFAKSINLECSEIEIFTNSKPSRVIPSFPGATKTFSTSFDSSNFLAIACSRPPEPTTSSFIPQPLLRIIYQHYIKKVRFNLVSVSILSQKRKETVFFPFIFLMSKMSHTCKDHSQAVFIRCFDGFLVTDRATGLDDGLNSCFGDFFHVIRKWEEGI

SEQ ID NO: 5045 - protein, 522 aa, Streptococcus pneumoniae
MIKKENIMTKRVLISVSDKAGIVEFAQELKKLGWEIISTGGTKVALDNAGVDTIAIDDVTGFPEMMDGRVKTLHPNIHGGLLARRDLDSHLEAAKDNKIELIDLVVVNLYPFKETILKPDVTYADAVENIDIGGPSMLRSAAKNHASVTVVVDPADYAVVLDELAANGETSYETRQRLAAKVFRHTAAYDALIAEYFTAQVGESKPEKLTLTYDLKQPMRYGENPQQDADFYQKALPTDYSIASAKQLNGKELSFNNIRDADAAIRIIRDFKDSPTVVALKHMNPCGIGQADDIETAWDYAYESDPVSIFGGIVVLNREVDAATAEKMHGVFLEIIIAPSYTDEALAILINKKKNLRILALPFNAQEASEVEAEYTGVVGGLLVQNQDVVKESPADWQVVTKRQPTETEATALEFAWKAIKYVKSNGIIVTNDHMTLGVGPGQTNRVASVRLAIDQAKDRLDGAVLASDAFFPFADNVEEIAKAGIKAIIQPGGSVRDQESIEAADKYGLTMVFTGVRHFRH

SEQ ID NO: 5046 - protein, 169 aa, Streptococcus pneumoniae
MLESKKTTRYVFYVYLMLLTWGILFKFETNPEFIAFFLAPRYINWIPFSEPLIVDGKIVFAEMLFNLIFFIPLGVCFPLIKTNLSSLRIVGTGFLISLLFECLQYILAIGITDITDLTLNTLGVCVGLLIYQIFIRVFKSQTRKWINILGMLSLGFAYLVLLLLHLIGV

SEQ ID NO: 5047 - protein, 115 aa, Streptococcus pneumoniae
ISKPTQTPSVFKVKSVISVIPIAKIYCKHSNNKLIKKPVPTILKLDKLVFIKGKQTPNGIKKIRLNNISAKTIFPSTISGSENGIQLIYLGAKKNAINSGFVSNLNKIPQVNNIR

SEQ ID NO: 5048 - protein, 181 aa, Streptococcus pneumoniae
MKKIAVFASGNGSNFQVIAEEFPVEFVFSDHRDAYVLERAKQLGVLSYAFELKEFESKTDYEAALVELLEEHQIDLVCLAGYIKIVGPTLLSAYEGRIVNIHPAYLPEFPGAHGIEDAWNAGVGQSGVTIHWVDSGVDTGQVIKQVRVPRLADDTIDRFEARIHEAEYRLYPEVVKALFTD

SEQ ID NO: 5049 - protein, 340 aa, Streptococcus pneumoniae
MTNKNAYAQSGVDVEAGYEVVERIKKHVARTERAGVMGALGGFGGMFDLSKTGVKEPVLISGTDGVGTKLMLAIKYDKHDTIGQDCVAMCVNDIIAAGAEPLYFLDYVATGKNEPAKLEQVVAGVAEGCVQAGAALIGGETAEMPGMYGEDDYDLAGFAVGVAEKSQIIDGSKVVEGDVLLGLASSGIHSNGYSLVRRVFADYTGEEVLPELEGKKLKEVLLEPTRIYVKAVLPLIKEELVNGIAHITGGGFIENVPRMFADDLAAEIDESKVPVLPIFKALEKYGQIKHEEMFEIFNMGVGLMLAVSPENVERVKELLDEAVYEIGRIVKKENESVIIK

SEQ ID NO: 5050 - protein, 480 aa, Streptococcus pneumoniae
MTYEVKSLNEECGVFGIWGHPDAAKLTYFGLHSLQHRGQEGAGILSNDQGQLKRHRDMGLLSEVFRNPANLDKLTGAGAIGHVRYATAGEASVDNIQPFLFRFHDMQFGLAHNGNLTNAASLKKELEQRGAIFSATSDSEILAHLIRRSHNPSLMGKIKEALSLVKGGFAYILLFENKLIAALDPNGFRPLSIGKMANGAVVVSSETCAFEVIGAEWIRDLKPGEIVIIDDEGIQYDSYTDDTQLAICSMEYIYFARPDSNIHGVNVHTARKRMGAQLAREFKHEADIVVGVPNSSLSAAMGFAEESGLPNEMGLIKNQYTQRTFIQPTQELREQGVRMKLSAVSGVVKGKRVVMVDDSIVRGTTSRRIVQLLKEAGATEVHVAIGSPALAYPCFYGIDIQTRQELIAANHTVEETRQIIGADSLTYLSIDSLIESIGIETDAPNGGLCVAYFDGDYPTPLYDYEEDYRRSLEEKTSFYK

SEQ ID NO: 5051 - protein, 1242 aa, Streptococcus pneumoniae
LMDKRIFVEKKADFQVKSESLVRELQHNLGLSSLKSIRIVQVYDVFDLAEDLFAPAEKHIFSEQGTDHVLDEVSVQADLANYAFFAIESLPGQFDQRAASSQEALLLLGSSSDVTVNTAQLYLVNKDIDATELEAVKNYLLNPVDSRFKDITTGIAKQEFSESDKTIPKLTFFESYTAEDFARYKAEQGMAMEVDDLLFIQDYFKSIGRVPTETELKVLDTYWSDHCRHTTFETELKHIDFSASKFQKQLQSTYDKYIAMREELGRSEKPQTLMDMATIFGRYERANGRLDDMEVSDEINACSVEIEVDVDGVKEPWLLMFKNETHNHPTEIEPFGGAATCIGGAIRDPLSGRSYVYQAMRISGAGDITAPISETRAGKLPQQVISKTAAHGYSSYGNQIGLATTYVREYFHPGFVAKRMELGAVVGAAPKGNVVREKPEAGDVIILLGGKTGRDGVGGATGSSKVQTVESVETAGAEVQKGNAIEERKIQRLFRNGNVTRLIKKSNDFGAGGVCVAIGELADGLEIDLNKVPLKYQGLNGTEIAISESQERMAVVVRPEDVDAFVAECNKENIDAVVVATVTEKPNLVMHWNGETIVDLERRFLDTNGVRVVVDAKVVDKDVKLPEERQTSAETLESDTLTVLSDLNHASQKGLQTVFDCSVGRSTVNHPLGGRYQLTPTEASVQKLPVQHGVTHTASVIAQGFNPYVAEWSPYHGAAYAVIEATARLVAAGANWSKARFSYQEYFERMDKQAERFGQPVAALLGSIEAQIQLGLPSIGGKDSMSGTFEELTVPPTLVAFGVTTADSRKVLSPEFKAVGENIYYIPGQALSAEIDFDLIKKNFAQFEASQADHKVTSASAVKYGGVVESLALATFGNYIGAEVTLPELKTALTAQLGGFVFTSPEEIAGVEKIGQTKADFTLTVNGVKLDGHKLDSAFQGTLEEVYPTEFTQAKELEEVPAVASDVVIKAKEKVEKPVVYIPVFPGTNSEYDSAKAFEKEGAEVNLVPFVTLNEEAIVKSVETMVDNIDKTNILFFAGGFSAADEPDGSAKFIVNILLNEKVRVAIDSFIARGGLIIGICNGFQALVKSGLLPYGNFEDANSTSPTLFYNDANQHVAKMVETRIANTNSPWLAGVQVGDIHAIPVSHGEGKFVVTAEEFAELRDNGQIFSQYVDFNGKPSMDSKYNPNGSVHAIEGITSKNGQIIGKMGHSERYEDGLFQNIPGNKDQHLFASAVKHFTGK

SEQ ID NO: 5052 - protein, 44 aa, Streptococcus pneumoniae
LWVSFLNMRSQGSLTPSTSTSISTEQALISSETSISSNRPLARS

SEQ ID NO: 5053 - protein, 203 aa, Streptococcus pneumoniae
LIIQKLKESKISDQSFSTSPLTQVINSPSLTSGATHFVEKLSDTEQLNKKVKIIPLEVVLRNYTAGSFSKRFGVDEGIALETPIVEFYYKNDDLDDPFINDEHVKFLQIAGDQQIAYLKEETRRINELLKVWFTEIGLKLIDFKLEFGFDKDGKIILADEFSPDNCRLWDADGNHMDKDVFRRGLGELTDVYEIVWEKLQELK

SEQ ID NO: 5054 - protein, 123 aa, Streptococcus pneumoniae
LDIEVLGGGGGGGGGGGGGGAFCGGGRLTRVKKGDVFDSNEAMSTKIKQGGTTYDIAIPSEYMINKMKDEDLLVPLDYSKIEGIENIGPEFLNQSFDPGNKFSIPYFWGDSLCGETFRHGTTQ

SEQ ID NO: 5055 - protein, 430 aa, Streptococcus pneumoniae; identical to SEQ ID NO: 3876

SEQ ID NO: 5056 - protein, 85 aa, Streptococcus pneumoniae
LFHMNLSNDGFVAFHYRSYGTFFLHKNRLHNIYSGFTHYKYYRAFFLHKNRLHNIYRGFTHYKYYRAQNPLFTKQGIFLLSLLLF

SEQ ID NO: 5057 - protein, 165 aa, Streptococcus pneumoniae
MLKSEKQSRYQMLNEELSFLLEGETNVLANLSNASALIKSRFPNTVFAGFYLFDGKELVLGPFQGGVSCIRIALGKGVCGEAAHFQETVIVGDVTTYLNYISCDSLAKSEIVVPMMKNGQLLGVLDLDSSEIEDYDAMDRDYLEQFVAILLEKTAWDFTMFEEKS

SEQ ID NO: 5058 - protein, 551 aa, Streptococcus pneumoniae
MYQALYRKYRSQNFSQLVGQEVVAKTLKQAVEQEKISHAYLFSGPRGTGKTSVAKIFAKAMNCPNQVGGEPCNNCYICQAVTDGSLEDVIEMDAASNNGVDEIREIRDKSTYAPSLARYKVYIIDEVHMLSTGAFNALLKTLEEPTQNVVFILATTELHKIPATILSRVQRFEFKSIKTQDIKEHIHYILEKENISSEPEAVEIIARRAEGGMRDALSILDQALSLTQGNELTTAISEEITGTISLSALDDYVAALSQQDVPKALSCLNLLFDNGKSMTRFVTDLLHYLRDLLIVQTGGENTHHSSVFVENLALPQKNLFEMIRLATVNLADIKSSLQPKIYAEMMTVRLAEIKPEPALSGAVENEIATLRQEVARLKQELSNAGAVPKQVAPAPSRPATGKTVYRVDRNKVQSILQEAVENPDLARQNLIRLQNAWGEVIESLGGPDKALLVGSQPVAANEHHAILAFESNFNAGQTMKRDNLNTMFGNILSQAAGFSPEILAISMEEWKEVRAAFSAKAKSSQTEKEVEESLIPEGFEFLADKVKVEED

SEQ ID NO: 5059 - protein, 64 aa, Streptococcus pneumoniae
MNKQQFIIMALFTAAETYFFNEAWMTGRYIMAAFWAILLFRNFRVSYVMGKIVDVIDQHFNRKD

SEQ ID NO: 5060 - protein, 256 aa, Streptococcus pneumoniae
MSVLEITDLHVEIEGKEILKGVNLTLKTGEIAAIMGPNGTGKSTLSAAIMGNPNYEVTKGEVLFDGVNILELEVDERARMGLFLAMQYPSEIPGITNAEFLRAAMNAGKEDDEKISVREFITKLDEKMELLNMKEEMAERYLNEGFSGGEKKRNEILQLLMLEPTFALLDEIDSGLDIDALKVVSKGVNAMRGEGFGAMIITHYQRLLNYITPDVVHVMMEGRVVLSGGPELAARLEREGYAKLAEELGYDYKEEL

SEQ ID NO: 5061 - protein, 420 aa, Streptococcus pneumoniae
MTRENIKLFSEMHAEPSWLADLRQKAFDKIETLELPVIERVKFHRWNLGDGTITENEPSANVPDFTALDHHLKLVQVGTQTVFEQTPVELAEQGVVFTDFHSALEEIPELIEEFFMSSVKYDDDKLAAYHTAYFNSGAVLYIPDNVEITEPIEGIFYQDSDSNVPFNKHIMIIAGKNSKISYLERLESRGEGSDKVTANITVEVIARSGAQVKFAAIDRLGENVTAYISRRGKLGNDASIDWAIGVMNEGNVVADFDSDLIGNGSHADLKVVALSSGRQVQGIDTRVTNYGCNSIGNILQHGVILEKATLTFNGIGHIIKGAKGADAQQESRVLMLSDQARSDANPILLIDENDVTAGHAASIGQVDPEDMYYLMSRGLDKATAERLVVRGFLGSVIVEIPVKEVRDEMIATIEEKLSKR

SEQ ID NO: 5062 - protein, 408 aa, Streptococcus pneumoniae
MLDVEAIRKDFPILDQIVNDEPLVYLDNAATTQKPLVVLKAINSYYEQDNANVHRGVHTLAERATASYEAARETIRKFINAGSTKEVLFTRGTTTSLNWVARFAEEILAEGDRVLISVMEHHSNIIPWQEACRKTGAELVYVYLKDGALDMEDLRAKLTDKVKFVSLAHASNVLGVVNPIKEITQLAHQVGAIMVVDGAQSTPHMKIDVQDLDLDFFAFSGHKMAGPTGIGVLYGKEKYLEQMSPVEFGGEMIDFVYEQFASWKELPWKFEAGTPNMAGAIGLATAVDYLEKIGMDAVEAHEQELIAYVYPKLQAIEGLTIYGSQDLAQRSGVIAFNLGDLHPHDLATALDYEGVAVRAGHHCAQPLLQYLEVPATARASFYIYNTKADCDKLVDALQKTKEFFNGTF

SEQ ID NO: 5063 - protein, 156 aa, Streptococcus pneumoniae
MPYKRQRSFSMALSKLDSLYMAVVADHSKNPHHQGKLEDAEQTSLNNPTCGDVINLSVKFDAEDRLEDIAFLNSGCTISTASASMMTDAVLGKTKQEILELATIFSEMVQGQKDERQGQLGDAAFLSGVAKFPQRIKCATLAWNALKKTIENQEKQ

SEQ ID NO: 5064 - protein, 470 aa, Streptococcus pneumoniae
MAEERVEPKPIDLGEYKFGFHDDVEPVLSTGKGLNEGVIRELSAAKGEPEWMLEFRLKSYETFKKMPMQTWGADLSEIDFDDLIYYQKPSDKPARSWDDVPEKIKETFERIGIPEAERAYLAGASAQYESEVVYHNMKEEFQKLGIIFTDTDSALKEYPDLFKQYFAKLVPPTDNKLAALNSAVWSGGTFIYVPKGVKVDIPLQTYFRINNENIGQFERTLIIVDEGASVHYVEGCTAPTYSSNSLHAAIVEIFALDGAYMRYTTIQNWSDNVYNLVTKRAKAQKDATVEWIDGNLGAKTTMKYPSVYLDGEGARGTMLSIAFANAGQHQDTGAKMIHNAPHTSSSIVSKSIAKGGGKVDYRGQVTFNKNSKKSVSHIECDTIIMDDLSASDTIPFNEIHNSQVALEHEAKVSKISEEQLYYLMSRGLSESEATEMIVMGFVEPFTKELPMEYAVELNRLISYEMEGSVG

SEQ ID NO: 5065 - protein, 64 aa, Streptococcus pneumoniae
VNLILKIKEQTRKLAAGCSKHCFEVVDETDEVSNHTYGKAMLTWLEEIFEEYKIKFYPTDPSIS

SEQ ID NO: 5066 - protein, 61 aa, Streptococcus pneumoniae
NLILYSSKISSSHVSIALPYVWLLTSSVSSTTSKQCFEQPAASFLVCSLILSIRFTQNQGF

SEQ ID NO: 5067 - protein, 413 aa, Streptococcus pneumoniae
MKKIFLTLLTVSLLGGASTAVAQDFTIAAKHAIAVEANTGKILYEKDATQPVEIASITKLITVYLVYEALENGSITLSTPVDISDYPYQLTTNSEASNIPMEARNYTVEELLEATLVSSANSAAIALAEKIAGSEKDFVDMMRAKLLEWGIQDATVVNTTGLNNETLGDNIYPGSKKDEENKLSAYDVAIVARNLIKKYPQVLEITKKPSSTFAGMTITSTNYMLEGMPAYRGGFDGLKTGTTDKAGESFVGTTVEKGMRVITVVLNADHQDNNPYARFTATSSLMDYISSTFTLRKIVQQGDAYQDSKAPVQDGKEDTVTAVAPEDIYLIEQIGNQSSQSVQFTPDSKAIPAPLEAGTVVGHLTYKDKDLIGQGYITTERPSFEMVADKKIEKAFFLKVWWNQFVRFVNEKL

SEQ ID NO: 5068 - protein, 369 aa, Streptococcus pneumoniae
MFRRNKLFFCTTEILLLTIIFYLWRQMGSLINPFVSVLNTIMIPFLLGGFLYYLTNPIVTFLNKVCKLNRLLGILITLCTLVWGMVIGVVYLLPILINQLSSLIISSQTIYSRVQDLIIDLSNYPALQNLDVEATIQQLNLSYVDILQNILNSVSNSVGSVLSALISTVLILIMTPVFLVYFLLDGHKFLPMLERTILKRDRLHIAGLLKNLNATIARYISGVSIDAIIIGCLAYIGYSIIGLKYALVFAIFSGVANLIPYVGPSIGLIPMIIANIFTDPHRLLIAVIYMLVVQQVDGNILYPRIVGSVMKVHPITILVLLLLSSNIYGVVGMIVAVPTYSILKEISKFLSRLYENHKIMKERERELAK

SEQ ID NO: 5069 - protein, 72 aa, Streptococcus pneumoniae
TRAIQIGSRLLVFRQLERKKCYFLQLYLTERLRRHTSRKICLIMPVESVTTPKDNKTIIPYLTQKCKKKSHT

SEQ ID NO: 5070 - protein, 66 aa, Streptococcus pneumoniae
FNSSKISCLRSVFNTESPPVIVYTIHSIILSFEVKHFLSFSFKIYHFFLFLEFLLQDKSLYGRLFE

SEQ ID NO: 5071 - protein, 246 aa, Streptococcus pneumoniae
VLKTERKQLILEELNQHHVVSLEKLVSLLETSESTVRRDLDELEAENKLRRVHGGAELPHSLQEEETIQEKSVKNLQEKKLLAQKAASLIKEKDVIFIDAGTTTAFLIHELVNKNVTVVTNSIHHAAQLVEKQIPTVMVGGNVKTATDASIGGVALNQINQLHFDRAFIGMNGVDDGYYTTPDMEEGAVKRAILENAKQTYVLVDSSKIGQTCFAKVAPLKRAIVITSQGHELLQVIKEKTEVIEV

SEQ ID NO: 5072 - protein, 303 aa, Streptococcus pneumoniae
  UNSURE (17): Xaa at each above location is unknown.
MIYTVTLNPSIDYIVRXDQVKVGSVNRMDSDDKFAGEKGINVSRVLKRLNISNTATGFIGGFTGKFITDTLAEEEIETRFVQVAEDTRINVKIKADQETEINGTGPTVEPVKLEELKAILSSLTAEDTVVFAGSSAKNLGNVIYKDLISLTRQTGAQVVCDFEGQTLIDSLDYQPLLVKPNNHELGAIFGVKLESLDEIEKYARELLAKGAQNVIISMAGDGALLVTSEGAYFAKPIKGTVKNSVGAGDSMVAGFTGEFVKSKDAVEAFKWGVACGTATTFSDDLATAEFIKETYGKVEVEKR

SEQ ID NO: 5073 - protein, 75 aa, Streptococcus pneumoniae
LNFHRFSTSTFPYVSLINSAVAKSSEKVVAVPQATPHLKASTASFDLTNSPVNPATIESPAPTEFLTVPLIGLAK

SEQ ID NO: 5074 - protein, 650 aa, Streptococcus pneumoniae
MKIQDLLRKDVMLLDLQATEKTAVIEEMIKSLTGHGYVTDFETFKEGILAREALTSTGLGDGIAMPHSKNAAVKEATVLFAKSNKGVDYESLDGQATDLFFMIAAPEGANDTHLAALTELSQYLMKDGFADKLRQATSADQVIELFDQASEKTEELVQAPANDSGDFIVAVTACTTGIAHTYMAQEALQKVPAEMGVGIKVETNGASGVGNQLTAEDIRKAKAIIIAANKAVEMDRFDGKPLINRPVADGIRKTEELINLAISGDAEVYRAANGAKVATASNEKQSLGGAFYKHLMSGVSQMLPFVIGGGIMIALAFLIDGALSVPNENLGNLGSYHELASMFMKIGGAAFGLMLPVFAGYVAYSIAEKPGLVAGFVAGAIAKEGFAFGNIPYAAGGEATSTLAGVSSGFLGALVGGFIAGALVLAIKKYVKVPRSLEGAKSILLLPLLGTILTGFVMLAVNIPMAAINTAMNDFLGGLGGGSAVLLGIVLGGMMAVDMGGPVNKAAYVFGTGTLAATVSSGGSVAMAAVMAGGMVPPLAIFVATLLFKDKFTKEERNSGLTNIIMGLSFITEGAIPFGAADPARAIPSFILGSAVAGGLVGLTGIKLMAPHGGIFVIALTSNALLYLVSVLVGAIVSGVVYGYLRKPQA

SEQ ID NO: 5075 - protein, 737 aa, Streptococcus pneumoniae
MANKNTSTTRRRPSKAELERKEAIQRMLISLGIAILLIFAAFKLGAAGITLYNLIRLLVGSLAYLAIFGLLIYLFFFKWIRKQEGLLSGFFTIFAGLLLIFEAYLVWKYGLDKSVLKGTMAQVVTDLTGFRTTSFAGGGLIGVALYIPTAFLFSNIGTYFIGSILILVGSLLVSPWSVYDIAEFFSRGFAKWWEGHERRKEERFVKQEEKARQKAEKEARLEQEETEKALLDLPPADMETGEILTEEAVQNLPPIPEEKWVEPEIILPQAELKFPEQEDDSDDQDVQVDFSAKEALEYKLPSLQLFAPDKPKDQSKEKKIVRENIKILEATFASFGIKVTVERAEIGPSVTKYEVKPAVGVRVNRISNLSDDLALALAAKDVRIEAPIPGKSLIGIEVPNSDIATVSFRELWEQSQTKAENFLEIPLGKAVNGTARAFDLSKMPHLLVAGSTGSGKSVAVNGIIASILMKARPDQVKFMMVDPKMVELSVYNDIPHLLIPVVTNPRKASKALQKVVDEMENRYELFAKVGVRNIAGFNAKVEEFNSQSEYKQIPLPFIVVIVDELADLMMVASKEVEDAIIRLGQKARAAGIHMILATQRPSVDVISGLIKANVPSRVAFAVSSGTDSRTILDENGAEKLLGRGDMLFKPINENHPVRLQGSFISDDDVERIVSFIKTQADADYDESFDPGEVSENEGEFSDGDAGGDPLFEEAKSLVIEIQKAVGIHDSASFVSWI

SEQ ID NO: 5076 - protein, 83 aa, Streptococcus pneumoniae
QRKLFKIFHLFQKKSGWNQKSSCLKLNLNSLNRKMTQMTKMFRSIFQPKKPLNTNFQAYNSLHQINQKISLKRRKLSEKISKS

SEQ ID NO: 5077 - protein, 94 aa, Streptococcus pneumoniae
ASSRLRQMQTTMRVLIQVRFLKMKENFRMEMLVVIRFLKKLSLWLSKYRKQLESMIQRRLSVGFNRATRLMEELEMAGVIGPAEGTKPRKVLQQ

SEQ ID NO: 5078 - protein, 71 aa, Streptococcus pneumoniae
RYQAKKSIAAIKNSFFPRLEGAILLAIDYFYTLRKSLQTTSALPCRIYVTDFVMSYLQPQNSVLSSLRLAS

SEQ ID NO: 5079 - protein, 219 aa, Streptococcus pneumoniae
MDFLKFLKPPAYRFQGLLDRAWSSPNYQSKSCFSRFLKSLVLLYHETEPATRKGNFSFFKIFLKKQSIINHNQRRECMSNYRRTSKPKTEHIKKGFTVFQKTITTIGSILGLITAGITIMNALDNNNKNTKKEPTTSQTTTFVKEIQKESPQENTTPNKENNTSQEKTQQEETPKSSVKEEKKEDQKTATQDSTTPATSKPATENEKQPNTPTSENNTQ

SEQ ID NO: 5080 - protein, 400 aa, Streptococcus pneumoniae
LSQAPFHDTIELVILESVRNMIYFDNSATTRPYPEALETYMQVASKILGNPSSLHRLGDQATRILDASRQQIADLIGKKSDEIFFTSGGTEGDNWIIKGVAFEKAQFGKHIIVSAIEHPAVKESALWLKAQGFEVDFAPVDNKGFVDVEALEDLIRPDTTLVSIMAVNNEIGSVQPIEAISKLLADKPTISFHVDAVQALAKIPTEKYLTERVDFATFSGHKFHGIRGVGFIYIKSGKKITPLLTGGGQERDYRSTTENVAGIAATAKALRLSMEKLDIFRSKTGQMKAVIRQALLDYPDIFVFSDEEDFAPHILTFGIKGVRGEVIVHAFEDYDIFISTTSACSSKAGKPAGTLIAMGVDKDKAQSAVRLSLDLENDMSQVEQFLTKLKLIYNQTRKVR

SEQ ID NO: 5081 - protein, 404 aa, Streptococcus pneumoniae
MQYSEIMIRYGELSTKGKNRMRFINKLRNNISDVLSIYPQVKVTADRDRAHAYLNGADYTAVAESLKQVFGIQNFSPVYKVEKSVEVLKSAVQEIMQDIYKEGMTFKISSKRSDHTFELDSRELNQTLGRAVFEAIPNVQAQMKSPDINLQVEIREEAAYLSYETVRGAGGLPVGTSGKGMLMLSGGIDSPVAGYLALKRGVDIEAVHFASPPYTSPGALKKAQDLTRKLTKFGGNIQFIEVPFTEIQEEIKAKAPEAYLMTLTRRFMMRITDRIREVRNGLVIINGESLGQVASQTLESMKAINAVTNTPIIRPVVTMDKLEIIDIAQEIDTFDISIQPFEDCCTIFAPDRPKTNPKIKNAEQYEARMDVEGLVERAVAGIMITEITPQAEKDEVDDLIDNLL

SEQ ID NO: 5082 - protein, 209 aa, Streptococcus pneumoniae
LNIESFLTMNQSYFYLKMKEHKLKVHYTGKERRVRILLPKDYEKDTDRSYPVVYFHDGQNVFNSKESFIGHSWKIIPAIKRNPDISRMIVVAIDNDGMGRMNEYAAWKFQESPIPGQQFGGKGVEYAEFVMEVVKPFIDETYRTKADCQHTAMIGSSLGGNIPSLSVWNTKTKLVAWAFFHLQTGSTKKPLTAISSARNYRLTSASSSM

SEQ ID NO: 5083 - protein, 115 aa, Streptococcus pneumoniae
LEYQDQIGCLGVFSSANWLHQEAFNRYIECQKLSPDQRIFIYVGTEEADDTDKTLMDGNIKQAYIDSSLCYYHDLIAGGVHLDNLVLKVQSGAIHSEIPWSENLPDCLRFFAEKW

SEQ ID NO: 5084 - protein, 111 aa, Streptococcus pneumoniae
MHIEHLSHWSGHLNREMYLNRYGHGGIPVVVFASSGGSHNEYYDFGMIDACASFIEEGRVQFFTLSSVDSESWLATWKNAHDQAEMHRAYERYVIEEAILLSSTRQVGLMA

SEQ ID NO: 5085 - protein, 143 aa, Streptococcus pneumoniae
LFTPPFPVMGDIMSPFSKSGWNLFLVKGFFELVKGWQTILFPGSKPRTQHNLCLTVTVNKPAVVLVPNIIYWRVLVNSIIVVVITDKETCVVNTTESNHFGKDIWMLEEEIECMIGSHRATCRHHAIKPTCLVLDKRMASSIT

SEQ ID NO: 5086 - protein, 60 aa, Streptococcus pneumoniae
MMTTGCSMGAYHALNFFLQHPDVFTKVIALSGVYDARFFVGDYYNDDAIYQNSPVDYIWN

SEQ ID NO: 5087 - protein, 388 aa, Streptococcus pneumoniae
MNYLVISPYYPQNFQQFTIELANKGITALGIGQESYEQLDEPLRNSLTEYFRVDNLENIDEVKRAVAFLFYKHGPIDRIESHNEYWLELDATLREQFNVFGAKPEDLKKTKYKSEMKKLFKKAGVPVVPGAVIKTEADVDQAVKEIGLPMIAKPDNGVRAAATFKLETEDDINHFKQEWDHSTLYFFEKFVTSSEICTFDGLVDKDGKIVFSTTFDYAYTPLDLMIYKMDNSYYVLKDMDPKLRKYGEAIVKEFGMKERFFHIEFFREGDDYITIEYNNRPAGGFTIDVYNFAHSLDLYRGYAAIVAGEEFPASDFETQYCLATSRRANAHYVYSEEDLLAKYSQQFKVKKVMPAAFAELQGDYLYMLTTPSRQEMEQMIADFGQRQE

SEQ ID NO: 5088 - protein, 497 aa, Streptococcus pneumoniae
MITGELKNKIDQLWEILWTEGNANPLTNIEQLTYLLFMKDLDSVELGRESDAEFLGIPYEGVFPKDKPEYRWSTFKNIGDAQEVYRLMTQEIFPFIKNLKGDTDDTAFSRYMREAIFQINKPATLQKAISILDVFPTRGLDVDFDNDKQSITDIGDIYEYLLSKLSTAGKNGQFRTPRHIIDMMVELMQPTIKDIISDPAMGSAGFLVSASRYLKRKKDEWETNTDNINHFHNQMFHGNDTDTTMLRLGAMNMMLHGVENPQISYLDSLSQDNEEADKYTLVLANPPFKGSLDYNSTSNDLLATVKTKKTELLFLSLFLRTLKPGGRAAVIVPDGVLFGSSKAHKGIRQEIVENHKLDAVISMPSGVFKPYAGVSTAILIFTKTGNGGTDKVWFYDMKADGLSLDDKRQPIRDNDIPDIIERFHHLEKEAERQRTDQSFFVPVAEIKENDYDLSINKYKEIEYEKVEYEPTEVILKKINDLEKEIQAGLAELEKLLK

SEQ ID NO: 5089 - protein, 373 aa, Streptococcus pneumoniae
MKKVKLGEVLSLKKGKKATVLAEQTTLSQRYIQIDDLRNNNNLKFTESLNMTEALPDDILIAWDGANAGTVGYGLSGAVGSTITVLKKNERYKEKIISDYLGVFLESKSQYLRDHSTGATIPHLNKNILLDLQLELLGIEEQENIICILNTIKRLITKRKFQLDELNLLVKSRFNEMFGENKIFESIDNLFDIIDGDRGKNYPKSDELFSEEYCLFLNTKNVTKNGFSFDTKQFITKTKDKLLRKGKLERYDIVLTTRGTVGNVAYYDELIKYKHLRINSGMVILRPKTPNLNQKFIIHVLRNNNYSRVISGSAQPQLPITKLKKILLPLPPLALQNEFADFVVQVDKSQLAIQKSLEELETLKKSLMQEYFG

SEQ ID NO: 5090 - protein, 78 aa, Streptococcus pneumoniae
MVVKTRKQGNSITITIPSEFNIPSGVKYEAKLLQSGEIIFTPEELGQQVSYVSDDAFDLNLDKIFDEYDDVFKALVEK

SEQ ID NO: 5091 - protein, 137 aa, Streptococcus pneumoniae
MTIYLTEKQIEKINALAIQRYSPNEKIQTVSSSALNMIVNLPEQFVFGKSLYPTIFDKATILFVQLIKKHVFANANKRTAFFVLVKFLQLNGYRFSVTVEEAVKMCVTIAVEALTDEKMTSYSKWVSEHSVREKVKK

SEQ ID NO: 5092 - protein, 275 aa, Streptococcus pneumoniae
LQLFITAKQVEGCSSKTIRYYQRTIENLFNAIKESVTQLTTDDLRSYLANYQSEKDCSKANLDNIRRILSSFFAWLEQEEYIIKNPIRRIKKIKTEQNVKETYTDEHLEIMRDNCENLRDLAIIDLLASTGMRVGELVQLNRSDIDFENRECVVFGKGKKERPVYFDARTKIHLRNYLNDRKDSHPALFVTLVGKAQRLGIAGVEIRLRKLGDKLGIQKVHPHKFRRTLATKAIDKGMPIEQVQKLLGHSKIDTTLAYAMVNQNNVKHSHQKFIS

SEQ ID NO: 5093 - protein, 368 aa, Streptococcus pneumoniae
MKKVKLGQVATFINGYAFKPQDWSSEGKEIIRIQNLTKTSKGINYYSGTIDKKYIVEAGDILISWSGTLGVFQWCGRSAVLNQHIFKVVFDKIDIDKSYFKYVVEKGLQDAVKHTHGSTMKHLTKKYFDNIIVPYTNLGEQQRIASELDLLSKLILRRQEQLEELNLLVKSRFNEMFGENKIFESIDNLFDIIDGDRGKNYPKSDELFSEEYCLFLNTKNVTKNGFSFDTKQFITKTKDKLLRKGKLERYDIVLTTRGTVGNVAYYDELIKYKHLRINSGMVILRPKTPNLNQKFIIHVLRNNNYSRVISGSAQPQLPITKLKKILLPLPPLALQNEFADFVVQVDKSQFACEIAIKVWRNSLKFSII

SEQ ID NO: 5094 - protein, 1116 aa, Streptococcus pneumoniae
MGNFSFLLKNDEYESFSKPCIEAENMIATSTVATAFMARRALEQAVHWIYSHDSYLEAPYRATLSSLVWDDDFRDIVDSELHKQIVLLIRWGNHAAHGGEIKEREAILALHHLYQFVNFIDYCYSNEFVERYFDEKCLPLSANIKYRETPQSMIKLQDSLPELPDFHEQMAAQSVEVQETYTEKRETAAQRQDVPFHIDQLSEAETRKLFIDIDLRLAGWIFEENCRVEIAVDGLKHGSGIGYCDYVLYGKNGKILAIVEAKKASVNPEVGEVQVKEYAEALEKHIGYQPICFITNGLKHYILDGPNRRQIAGFYSQEELQLVMDRRHLQKPLEDISSKIRDDISGRHYQKHAIASVCEAFSNHRRQALLVMATGAGKTRTAVSLVDILSRHNWVKNVLFLADRTSLVKQAYDSFRKLLPDLSVCNFLEDKEGAQSSRMVFSTYPTMIGAISGQEEVNQRPFTVGHFDLIIIDESHRSIYQKYKSIFDYFDARIVGLTATPRQDLDKNTYGFFNLENGVPTYAYDLEEAVKDGYLVAYHSIETKLKLPTDGLHYDDLSEEEKEHFDSKFEDDSCEKDIDGSVFNSFVFNKSTVEIVLNELMTRGIQTASGDEIGKTIIFAKNHDHAEYIRGIFNNRYPEKGSDYAQVIDYSIKHYQTLIDDFKIKEKYPQIAISVDMLDTGIDVPEVVNLVFFKKVRSKTKFWQMIGRGTRLCKDLFGPEQDKENFLVFDYGDNFDYFRADPRDGEGRHIVSLTQRLFNIKVDLIRELQGLQYQEDQFARAYRQQLVSELQGRIESLNELDFRVRMVLDTVYSYRKLESWQNLTAVTSETIQKNLSPLLFDEDKEDEMARRFDLWLLHIQLGQLTAKSSTVHISQVMKTARALSAIGNIPQVFEQAEIIRKVQEPEFWKEVNLSDLEKIRLAIRDLLQFLDKTDRKPYYVNFEDRILSTVHETTAFLQVNDLRSYNEKVEHYLKTHLDEESISKLYHNKKLTSDDMLALEKLLWEKLGSKADYQSHYENKAIPRLVREIIGLDRESANRIFSKFLSDENLNARQISFVKLIVDYIVENGFLETKVLTQEPFKSYGSVQLLFQHQLPVLRNIVQIIELINNRAGEAA

SEQ ID NO: 5095 - protein, 156 aa, Streptococcus pneumoniae
MNKSEHRHQLIRALITKNKIHTQAELQALLAENDIQVTQATLSRDIKNMNLSKVREEDSAYYVLNNGSISKWEKRLELYMEDALVWMRPVQHQVLLKTLPGLAQSFGSIIDTLSFPDAIATLCGNDVCLIICEDADTAQKCFEELKKFAPPFFFEE

SEQ ID NO: 5096 - protein, 757 aa, Streptococcus pneumoniae
MRFNQYSYINFPKENVLSELKKCGFDLQNTANHKDSLETFLRRFFFTYQDTNYPLSILAADKKTDLLTFFQSEDELTADIFYTVAFQLLGFSYLVDFEDSDVFRKETGFPIIYGDLIENLYQLLNTRTKKGNTLIDQLVSDGLIPEDNDYHYFNGKSLATFSNQDVIREVVYVESRVDTDQKGLSDLVKVSIIRPRFDGKIPAIMTASPYHQGTNDKASDKALYKMEGELEVKLPHKIELEKPQLNLVQPQGKAELIAEAEEKLTHINSSYTLNDYFLPRGFANLYVSGVGTKDSTGFMTNGDYQQIEAYKNVIDWLNGRCRAFTDHTRQRQVKADWSNGKVATTGLSYLGTMSNGLATTGVDGLEVIIAEAGISSWYNYYRENGLVTSPGGYPGEDFDSLAELTYSRNLLAGDYIRGNEAHQADLEKVKAQLDRKTGDYNQFWHDRNYLLNAHKVKAEVVFTHGSQDWNVKPLHVYQMFHALPTHIHKHLFFHNGAHVYMNNWQSIDFRESINALLTKKLLGQETDFQLPTVIWQDNTAPQTWLSLDNFGGQENCETFSLGQEEQAIQNQYPDKDFERYGKTYQTFNTELYQGKANQITINLPVTKDLHLNGRAQLNLRIKSSTNKGLLSAQLLEFGQKKYLQPYPAILSARTIDNGRYHMLENLCELPFRPEAQRVVTKGYLNLQNRNDLLLVEDITADEWMDVQFELQPTIYKLKEGDTLRLVLYTTDFEITIRDNTDYHLTVDLAQSMLTLPC

SEQ ID NO: 5097 - protein, 1033 aa, Streptococcus pneumoniae
LIAQLDTKTVYSFMESVISIEKYVRAAKEYGYTHLAMMDIDNLYGAFDFLEITKKYGIHPLLGLEMTVFVDDQGVNLRFLALSSVGYQQLMKLSTAKMQGEKTWSVLSQYLEDIAVIVPYFDRVESLELGCDYYIGVYPETLASEFHHPILPLYRVNAFESRDREVLQVLTAIKENLPLREVPLRSRQDVFISASSLEKLFQERFPQALDNLEKLISGISYDLDTSLKLPRFNPARPAVEELRERAELGLVQKGLTSKEYQDRLDQELSVIHDMGFDDYFLVVWDLLRFGRSNGYYMGMGRGSAVGSLVSYALDITGIDPVEKNLIFERFLNRERYTMPDIDIDIPDIYRPDFIRYVGNKYGSKHAAQIVTFSTFGAKQALRDVLKRFGVPEYELSAITKKISFRDNLKSAYEGNLQFRQQINSKLEYQKAFEIACKIEGYPRQTSVHAAGVVISDQDLTNYIPLKYGDEIPLTQYDAHGVEASGLLKMDFLGLRNLTFVQKMQELLAEIEGIHLKIEEIDLEDKETLDLFASGNTKGIFQFEQPGAIRLLKRVQPVCFEDVVATTSLNRPGASDYINNFVARKHGQEEVTVLDPVLEDILAPTYGIMLYQEQVMQVAQRFAGFSLGKADILRRAMGKKDASAMHEMRASFIQGSLEAGHTVEKAEQVFDVMEKFAGYGFNRSHAYAYSALAFQLAYFKTHYPAIFYQIMLNSANSDYLIDALEAGFEVAPLSINTIPYHDKIANKAIYLGLKSIKGVSNDLALWIIEHRPYSNIEDFIAKLPENYLKLPLLEPLVKVGLFDSFEKNRQKVFNNLANLFEFVKELGSLFGDAIYSWQESEDWTEQEKFYMEQELLGIGVSKHPLQAIASKAIYPITPIGNLSENSYAIILVEVQKIKVIRTKKGENMAFLQADDSKKKLDVTLFSDLYRQVGQEIKEGAFYYVKGKIQSRDGRLQMIAQEIREAVAERFWIQVKNHESDQEISRILEQFKGPIPVIIRYEEEQKTIVSPHHFVAKSNELEEKLNEIVMKTIYR

SEQ ID NO: 5098 - protein, 62 aa, Streptococcus pneumoniae
MAAFIPGASPPLVKTAIRFILVYAPFSFNILLDYITFDFKILLFSVFLAINRFHNDFIQFLL

SEQ ID NO: 5099 - protein, 335 aa, Streptococcus pneumoniae
MKRIAVLTSGGDAPGMNAAIRAVVRQAISEGMEVFGIYDGYAGMVAGEIHPLDAASVGDIISRGGTFLHSARYPEFAQLEGQLKGIEQLKKHGIEGVVVIGGDGSYHGAMRLTEHGFPAIGLPGTIDNDIVGTDFTIGFDTAVTTAMDAINKIRDTSSSHRRTFVIEVMGRNAGDIALWAGIATGADEIIIPEAGFKMEDIVASIKAGYECGKKHNIIVLAEGVMSAAEFGQKLKEAGDTSDLRVTELGHIQRGGSPTARDRVLASRMGAHAVKLLKEGIGGVAVGIRNEKMVENPILGTAEEGALFSLTAEGKIVVNNPHKADIELSSLNKSLS

SEQ ID NO: 5100 - protein, 235 aa, Streptococcus pneumoniae
MNKRVKIVATLGPAVEIRGGKKFGEDGYWGEKLDVEASAKNIAKLIEAGANTFRFNFSHGDHQEQGERMATVKLAEKIAGKKVGFLLDTKGPEIRTELFEGEAKEYSYKTGEKIRVATKQGIKSTREVIALNVAGALDIYDDVEVGRQVLVDDGKLGLRVVAKDDATREFEVEVENDGIIAKQKGVNIPNTKIPFPALAERDNDDIRFGLEQGINFIAISFVRTAKECERSSCNL

SEQ ID NO: 5101 - protein, 304 aa, Streptococcus pneumoniae
LLNAITTISVSVLNKVSTSSQFHSYVLQKNVNEVRAICEETGNGHVQLFAKIENQQGIDNLDEIIEAADGIMIARGDMGIEVPFEMVPVYQKMIIKKVNAAGKVVITATNMLETMTEKPRATRSEVSDVFNAVIDGTDATMLSGESANGKYPLESVTTMATIDKNAQALLNEYGRLDSDSFERNSKTEVMASAVKDATSSMDIKLVVTLTKTGHTARLISKYRPNADILALTFDELTERGLMLNWGVIPMLTDAPSSTDDMFEIAERKAVEAGLVESGDDIVIVAGVPVGEAVRTNTMRIRTVR

SEQ ID NO: 5102 - protein, 73 aa, Streptococcus pneumoniae
LSIVAIVVTDSSGYLPFADSPDSIVASVPSITALNTSDTSERVARGFSVIVSSMFVAVITTLPAALTFLIIIF

SEQ ID NO: 5103 - protein, 66 aa, Streptococcus pneumoniae
RKAFNITLQKANTKLEKPINQPLSSHIFRHTLLSTLAEKNAIMVRVEHKNAKTVNNIYTHVSKRME

SEQ ID NO: 5104 - protein, 100 aa, Streptococcus pneumoniae
PLDAGQRFRYGVSIIPDDYDPIAYVVSKSMEPKIRNSDYLFIKNTPQIDYNTIGIFQVDGANYVKKLRQGYLKKTQSQIPRHPPRRKQPYSYHRESCQAI

SEQ ID NO: 5105 - protein, 84 aa, Streptococcus pneumoniae
LDTKIGISKNTIRNYEKRVRSTKKNTIFDLVKVFSSLIDALFSPVQKDSPSDIQSIYDQRAPPRQGKVLTYAERQLYDQKNEVS

SEQ ID NO: 5106 - protein, 290 aa, Streptococcus pneumoniae
MKKSRKLATLGICSALFLGLAACQQQHATSEGTNQRQSSSAKVPWKASYTNLNNQVSTEEVKSLLSAHLDPNSVDAFFNLVNDYNTIVGSTGLSGDFTSFTHTEYDVEKISHLWNQKKGDFVGTNCRINSYCLLKNSVTIPKLEKNDQLLFLDNDAIDKGKVFDSQDKEEFDILFSRVPTEATTDVKVHAEKMETFFSQFQFNEKARMLSVVLHDNLDGEYLFVGHVGVLVPADDGFLFVEKLTFEEPYQAIKFASKEDCYKYLGTKYADYTGEGLAKPFIMDNDKWVKL

SEQ ID NO: 5107 - protein, 127 aa, Streptococcus pneumoniae
MNYEASKQLTDARFKCLVGVQRTTFEEILAVLKTAYQLKHTKGGRKPKLSLEDLLMATLQYVREYRTYEQIAAVFGIHESNLLRRSQWVEVTLVQSSFTISRTPLSSEDTVMIDRHSHQYRIFGHSQ

SEQ ID NO: 5108 - protein, 103 aa, Streptococcus pneumoniae
MELKDFTEKEQEMIKKRLTMSNISDKETTEKILALVPQDLIKRIPFFVRKHATTRTIKRISIEHPELYAVAQTSGEIPEKECEELRQIITTIFEQKMNKHSIK

SEQ ID NO: 5109 - protein, 238 aa, Streptococcus pneumoniae
MKKYFIGGLGSNAYHSKDFLQELDSQVYFLNPYEKHLRDETELKSWFKNEIVEEEFICLIGHSLGGDLARYLASEFEEVKKLILLDGGYLDLDKILPLDTELEETKNYIKSQIVLDLDVLTSKEKSEAKHWSENMEKAVRQSYHWNVEYNRYELAINYENIEAILRLRRKIQAFKREVGDTLFISPRYPNEATWREEALKELPDYFDTIFLENFGHELYTQAPKEIASLMNEWLAYFL

SEQ ID NO: 5110 - protein, 131 aa, Streptococcus pneumoniae
LFVFILIFLKSSIYIGIFWFIDFGKAVDFQGWKVLFEFFMVVIDQFSFGCYPSVVFILPGIALGQQSIDTRICDTVDNAESEQKLTIGMTGVVIDKACKLDCLALKLIWIVVDSLHDFHIVFISDLNTILG

SEQ ID NO: 5111 - protein, 271 aa, Streptococcus pneumoniae
MIRFLVLAGYFELTIYLHLSGKLNQYINMHYSYLAYISMVLSFILAIVQLYIWMKQVKTHSHLNSRLAKMTSISLLAIPLVIGLTFPTVSLDSQTVSAKGYHFPLSEGTDLAIQTSEGTTSQYLKPDTSSYFSKSAYEKEMRTAADKYLSQDSIQITNENYMEVMEAIYDYPDEFEGKTIQFTGFVYNDPSHANSQFLFRFGIIHCIADSGVYGLLTKGNTRQYENNTWITAKGKLVNHYHKELKQNLPTLEIDSFTKVDKPENPYVYRAF

SEQ ID NO: 5112 - protein, 301 aa, Streptococcus pneumoniae
MTAFQQLPSSVLQTGAIFLSIIIEALPFVLIGSIVSGLIEVYITPDKVYHFLPRNRWGRIFFGTFVGILFPSCECGIVPIINRFLEKKVPSYTAVPFLVTAPVINPIVLFATYSAFGNSFHVALLRALGSIVVAVILGIFLGFFWQEPIQKENRLACHEHDFSHLSPAKKVFQVFVQAIDEFFDTGRYLVFGCLFASVIQVYVPTRILTSISATPLFAILLLMILAFLLSLCSEADAFIGASLLSSFGLAPVLAFLVIGPMLDIKNILMMKNYLKARFISHFITIVTLVVLAYSLLIGVIL

SEQ ID NO: 5113 - protein, 709 aa, Streptococcus pneumoniae
MDKKYEKISQDLGVTLKQIDTVLSLTAEGATIPFIARYRKDMTGSLDEVAIKAIIDLDKSLTNLNDRKEAVLAKIQEQGKLTKELEEAILVAEKLADVEELYLPYKEKRRTKATIAREAGLFPLARLILQNIVDLEKEAEKFVCEGFATGKEALTGAVDILVEALSEDVTLRSMTYQEVLRHSKLTSQAKDESLDEKQVFQIYYDFSETVGTMQGYRTLALNRGEKLGVLKIGFEHATDRILAFFATRFKVKNAYIDEVVQQSVKKKVLPAIERRIRTELTEKAEEGAIQLFSDNLRNLLLVAPLKGRVVLGFDPAFRTGAKLAVVDATGKMLTTQVIYPVKPASARQIEEAKKDLADLIGQYGVEIIAIGNGTASRESEAFVAEVLKDFPEVSYVIVNESGASVYSASELARQEFPDLTVEKRSAISIARRLQDPLAELVKIDPKSIGVGQYQHDVSQKKLSESLDFVVDTVVNQVGVNVNTASPALLSHVAGLNKTISENIVKYREEEGKITSRSQIKKVPRLGAKAFEQAAGFLRIPESSNILDNTGVHPENYTAVKELFKRLDIKDLNEEAQSKLKSLSVKEMAQELDLGPETLKDIIADLLKPGRDFRDSFDAPVLRQDVLDIKDLVVGQKLEGVVRNVVDFGAFVDIGIHEDGLIHISHMSRKFIKHPSQVVSVGDLVSVWVKQIDTEREKVNLSLLAPNETD

SEQ ID NO: 5114 - protein, 149 aa, Streptococcus pneumoniae
MKLTDYVKQVSLEDFGRPFIHHVQWNRRLRSTGGRFFPKDGHLDFNPKVYQELGLDVFRKIVRHELCHYHLYFQGKGYQHKDRDFKELLKAVDGLRFVPSLPNSNSKPLKLYRCQSCQQTYQRKRRIDTKRYRCGLCRGKLLLINQPED

SEQ ID NO: 5115 - protein, 84 aa, Streptococcus pneumoniae
MSNLAERGNIMNSKFYKMRRNRMISGVLAGLSDKWNFDVTLVRFLFAIFTVANFGLGVIIYIILASIMPTKEEIEAEMYGTGPR

SEQ ID NO: 5116 - protein, 63 aa, Streptococcus pneumoniae
MKHKEHILIGLLYLLSPFIGQLLVEHTHFIGTEFTGTAYVICWLSVVISTHHFSKNVWSQQQK

SEQ ID NO: 5117 - protein, 252 aa, Streptococcus pneumoniae
MTLLDVKHVQKIYKTRFQGNQVEALKDIHFTVEKGDYVAIMGESGSGKSTLLNILAMLDKPSRGQVYLNGTDTATIKNSQASSFRREKLGFVFQDFNLLDTLSVKDNILLPLVLSRRPITEMMKKLVVTAENLGINQLQEKYPYEISGGQKQRVAVARAIITEPEILLADEPTGALDSKSSAALLDVFDEINERGQTILMVTHSTAAASRAKRVLFIKDGILYNQIYRGEKTERQMFQEISDTLTVMASEVN

SEQ ID NO: 5118 - protein, 74 aa, Streptococcus pneumoniae
LIKSTRLALLAAAVEWVTMRMVWPRSLISSKTSSKAADDLESRAPVGSSARRISGSVMMARATATRCFWPPEIS

SEQ ID NO: 5119 - protein, 662 aa, Streptococcus pneumoniae
MFRLTNKLAVSNLIKNRKLYYPFALAVLLAVTLTYLFYSLTFNPKIAEIRGGTTIQATLGFGMFVVTLASAIIVLYANSFVMKNRSKELGIYGMLGLEKRHLISMTFKELVVFGILTVGAGIGIGALFDKLIFAFLLKLMKLKVELVATFQTKVVITVLVVFGLIFLGLMFLNALRIARMNALQLSREKASGEKKGRFLPLQTILGSISLGIGYYLALTVKDPLTALTTFFIAVLLVIFGTYLLFNAGITVFLQILKKNKKYYYQPNNLISVSNLIFRMKKNAVGLATIAILSTMVLVTMSAATSIFNSAESFKKVLNPHDFGVSGQNVEKEDLDKLLSQFASDNGYKIKEKEVFRYTYFGVANQEGNKLTFFEKGQNRVQPTTVFMVFDQKDYENMTGQKLSLSGNEVGLFAKNDGLKGQKTLILNDHQFSVKEEFNKDFIVNHVPNQFNILTADYNYLVVPDLQAFLNQFPDSDIYNQFYGGMNVNVSEEEQLKVAEEYENYLNQFNAQLDTEGSYVYGSNLADASSQMSALFGGVFFIGIFLSIIFMVGTVLVIYYKQISEGYEDRERFIILQKVGLDQKQIKQTIHKQVLTVFFLPLLFAFIHLAFAYHMLSLILKVIGVLDTTMMLIVTLSICAIFLIAYVLIFMITSRSYRKIVQM

SEQ ID NO: 5120 - protein, 196 aa, Streptococcus pneumoniae
VVIGVASATTNIWIIFLSGFAAILAGAFSMAGGEYVSVSTPKDTEEAAVSREKLLLDQDRELAKKSLYAAYIQNGECKTSAQLLTNKIFLKNPLKALVEEKYGIEYEEFTNPWHAAISSFVAFFLRSLPPMLSVTIFPSEYRIPATVLIVGVALLLTGYTSARLGKDPTRTAMIRNLAIGLLTRGVTFLLEQLFSI

SEQ ID NO: 5121 - protein, 364 aa, Streptococcus pneumoniae
VLYLLFNHKHKKGTEMQDNYTTKGKHLTIDSRRLIERWKKEGKSNREIASLLGKAPQTIHTKIKRRTVRKCLGKGRFKEVYSADYAQQSYENNRKRSVKKSSLTKELKEKILHYHNQKFSPEMMVMAKGVNVGISTIYYWIHHGKLGLSKQDLLYPRKGKVLKKQASTNFKPAGQSIAQRPEAINLRLENGHYEIDTVLLTRSKNYCLLVLTDRKSRHQIIRLIPNKSAEVVNQALKLILKQHKILSITADNGTEFNRLSDVFSEEHIYYAHPYASWERGTNENHNRLIHRWLPKGTKKMTPKEVAFIEKWINNYPKKCLNYKSPREDFLMANLNLKFSVRNKSRNRFKFCRSFKYPARRCSWC

SEQ ID NO: 5122 - protein, 60 aa, Streptococcus pneumoniae
VAFQPRFGIQPCLSVGIFYSGLYLLENIISFSKLYYYIMFLRTCKVFFDKKQKYNRLKLE

SEQ ID NO: 5123 - protein, 491 aa, Streptococcus pneumoniae
LKELDQNQAPIYEALVKLRKKRIVPFDVPGHKRGRGNPELVELLGEKCVGIDVNSMKPLDNLGHPISIIRDAEELAADAFGASHAFLMIGGTTSSVQTMILATCKAGDKIILPRNVHKSAINALVLCGAIPIYIEMSVDPKIGIALGLENDRVAQAIKDHPDAKAILINNPTYYGICSDLKGLTEMAHEAGMMVLVDEAHGAHLHFTGKLPISAMDAGADMAAVSMHKSGGSLTQSSLLLIGEQMNPEYVRQIINLTQSTSASYLLMASLDISRRNLALRGKESFEEVIELSEYARHEINAIGGYYAYSKELIDGVSVCDFDVTKLSVYTQGIGLTGIEVYDLLRDEYDIQIEFGDIGNILAYISIGDRIQDIERLVGALADIKRLYSRDGKDLIAGEYIQPELVLSPQEAFYSERKSLTLDESVGQVCGEFVMCYPPGIPILAPGERITREIVDYIQFAKERGCSLQGTEDPEVNHINVIKRKTNYKKSQ

SEQ ID NO: 5124 - protein, 78 aa, Streptococcus pneumoniae
LDKIVGKHSEYTYQLLTRYPNPQKRIEAGFDKLIEIKRLTASNSRAFCRALKSSPNHQIEIRNSLDKTIDFSYSLSFS

SEQ ID NO: 5125 - protein, 175 aa, Streptococcus pneumoniae
MLYVGIDVAKNKHDVTALNVPGKTVLKPLTFSNNKAGFELLDLSLRQLNQDCLIALENTGHYAFNLLNFLHEQGYKVYTYNPLLIKEFAKSLSLRKTKTDKKDAHGIALKLLSDPNREQFQHDNRQVELKILARHIHRLKKNSLIGKYNTLVVLISSFLSWIKSLESIQNIPTNS

SEQ ID NO: 5126 - protein, 286 aa, Streptococcus pneumoniae
MDLWFSEVHTPDVKLSLRTAKQLYAGKSEWQDIEVLDTPAFGKILILNGHVLFSDADDFVYNEMTVHVPMAVHPNPKKVLVIGGGDGGVAQVLTLYPELEQIDIVEPDEMLVEVCREYFPDFAAGLDDPRVTIYYQNGLRFLRNCEDDYDIIINDATDPFGHTEGLFTKEFYGNSYRALKEDGIMIYQHGSPFFDEDESACRSMHRKVNQAFPISRVYQAHIPTSPAGYWLFGFASKKYHPVKDFDKEGWKKRQLFTEYYTANLHVGSFMLPKYVEDILEEEEGKK

SEQ ID NO: 5127 - protein, 419 aa, Streptococcus pneumoniae
MSRLLVIGCGGVAQVAISKICQDSETFTEIMIASRTKSKCDDLKAKLEGKTSTKIETAALDADKVEEVIALIESYKPEAVLNVALPYQDLTIMDACLATGVHYIDTANYEAEDTEDPEWRAIYEKRCKELGFTAYFDYSWQWAYQEKFKEAGLTALLGSGFDPGVTSVFSAYALKHYFDEIHYIDILDCNGGDHGYPFATNFNPEINLREVSAPGSYWEDGKWVEVEAMSIKREYDFPQVGQKDMYLLHHEEIESLAKNIPGVKRIRFFMTFGQSYLTHMKCLENVGLLRTDTINFNGQEIVPIQFLKALLPDPASLGPRTVGKTNIGCIFTGVKDGVEKTIYIYNVCDHQECYAEVGSQAISYTTGVPAMIGTKLVMNGTWKQAGVYNLEELDPDPFMEALNEYGLPWVVVENPQMVD

SEQ ID NO: 5128 - protein, 375 aa, Streptococcus pneumoniae
MKLEQVPTPAYVIDLAKLEANCRILQYVQEEVGCKVLLAQKAYSLYKTYPLISQYLSGTTASGLYEAKLAREEFPGEVHVFAPAFKDADLEELLEIMDHIVFNSERQLRKHGPRCREAGVSVGLRLNPQCSTQGDHALYDPCAPGSRFGVTIDKIPSDLLDLVDGLHFHTLCEQGADDLQTTLKAVEEQFGPYLHEVKWLNMGGGHHITREGYDVDLLISEIKRIRKTYNLEIYIEPGEAIALNAGYLATEVLDIVENGMEILVLDASATCHMPDVLEMPYRPSLRNGFEAQEKAHTYRLSSNTCLTGDVIGDYSFENPVQIGDRLYFQDMAIYSFVKNNTFNGIGLPSLYLMDEQGDCSLLKAFGYQDFKGRLS

SEQ ID NO: 5129 - protein, 361 aa, Streptococcus pneumoniae
MMDSPKKLGYHMPAEYEPHHGTLMIWPTRPGSWPFQGKAAKRAFTQIIETIAEGERVYLLVEQAYLSEAQSYLGDKVVYLDIPTNDAWARDTGPTILVNDKGKKLAVDWAFNAWGGTYDGLYQDYEEDDQVASRFAEALGRPVYDAKPFVLEGGAIHSDGQGTILVTESCLLSPGRNPNLTKEEIENTLLESLGAEKVIWLPYGIYQDETNEHVDNVAAFVGPAELVLAWTDDENDPQYAMSKADLELLEQETDAKGCHFTIHKLPIPAVRQVVTEEDLPGYIYEEGEEKRYAGERLAASYVNFYIANKAVLVPQFEDVNDQVALDILSKCFPDRKVVGIPARDILLGGGNIHCITQQIPE

SEQ ID NO: 5130 - protein, 291 aa, Streptococcus pneumoniae
MRNVRVATIQMQCAKDVATNIQTAERLVRQAAEQGAQIILLPELFEHPYFCQERQYDYYQYAQSVAENTAIQHFKVIAKELQVVLPISFYEKDGNVLYNSIAVIDADGEVLGVYRKTHIPDDHYYQEKFYFTPGNTGFKVWNTRYAKIGIGICWDQWFPETARCLALNGAELLFYPTAIGSEPILDTDSCGHWQRTMQGHAAANIVPVIAANRYGLEEVTPSEENGGQSSSLDFYGSSFMTDETGAILERAERQEEAVLLATYDLDKGASERLNWGLFRDRRPEMYRQITD

SEQ ID NO: 5131 - protein, 269 aa, Streptococcus pneumoniae
MIKLLALDMDGTLLNEAKEIPQAHIAAIHQAIEKGVKLVLCTGRPLFGVLPYYKKLGLDLQNEYVIVNNGCSTHQTSDWGLVDWQELSPADIEYLYDLAEKSDVQLTLFDESHYFVLGGKPNQVIENDAKLVFSDLTEISLEEATSGKLRMFQGMFLGTKEQTDDFEQRFAEELCQRFSGVRSQPVIYEAMPLGTTKATALSRLAEILKIDSSEIMAMGDANNDIEMLQFAGLGIAMGNASDYVKSLADAVTSSNEEDGVARAIEKYIL

SEQ ID NO: 5132 - protein, 73 aa, Streptococcus pneumoniae
MILMTKNINLTNEELELIQGGADPYGKNPNGRYDWEIEPVLTLPVHGFCPRGTYDLGYIGGGNHLCKGSAARF

SEQ ID NO: 5133 - protein, 223 aa, Streptococcus pneumoniae
MKKRAIQILLALSLIFYKSTWFWRVFNHLAKPYLPASREFFQILLLMESGVLFLAVIYLLVFAGKKIFHFKWQLRYFIYLLLGYIISYMSDFLFSYFISLSSNQISLNETVEMMGRQEFPYFLLIVCFIAPIAEELIYRGVLMTTFFKNSPWYGDVLLSAIIFGYIHINFALTPLAFFIYASGGLILALLYRMTKNLYYPILVHILINITAFWDVWLLLFSGS

SEQ ID NO: 5134 - protein, 302 aa, Streptococcus pneumoniae
MNIQQLRYVVAIANSGTFREAAEKMYVSQPSLSISVRDLEKELGFKIFRRTSSGTFLTRRGMEFYEKSQELVKGFDIFQNQYANPEEEKDEFSVASQHYDFLPPTITAFSERYPDYKNFRIFESTTVQILDEVAQGHSEIGIIYLNNQNKKGIMQRVEKLGLEVIELIPFHTHIYLREGHPLAQKEELVMEDLADLPTVRFTQEKDEYLYYSENFVDTSASSQMFNVTDRATLNGILERTDAYATGSGFLDSDSVNGITVIRLKDNLDNRMVYVKREEVELSQAGTLFVEVMQEYFDQKRKS

SEQ ID NO: 5135 - protein, 153 aa, Streptococcus pneumoniae
MKKRAIVAVIVLLLIGLDQLVKSYIVQQIPLGEVRSWIPNFVSLTYLQNRGAAFSILQDQQLLFAVITLVVVIGAIWYLHKHMEDSFWMVLGLTLIIAGGLGNFIDRASQGFVVDMFHLDFINFAIFNVADSYLTVGVIILLIAMLKEEINGN

SEQ ID NO: 5136 - protein, 295 aa, Streptococcus pneumoniae
MEIKIETGGLRLDKALSDLSELSRSLANEQIKSGQVLVNGQVKKAKYTVQEGDVVTYHVPEPEVLEYVAEDLPLEIVYQDEDVAVVNKPQGMVVHPSAGHTSGTLVNALMYHIKDLSGINGVLRPGIVHRIDKDTSGLLMIAKNDDAHLALAQELKDKKSLRKYWAIVHGNLPNDRGVIEAPIGRSEKDRKKQAVTAKGKPAVTRFHVLERFGDYSLVELQLETGRTHQIRVHMAYIGHSVAGDEVYGPRKTLKGHGQFLHAKTLGFTHPRTGKTLEFKADIPEIFKETLERLRK

SEQ ID NO: 5137 - protein, 627 aa, Streptococcus pneumoniae
MKKKLTSLALVGAFLGLSWYGNVQAQESSGNKIHFINVQEGGSDAIILESNGHFAMVDTGEDYDFPDGSDSRYPWREGIETSYKHVLTDRVFRRLKELGVQKLDFILVTHTHSDHIGNVDELLSTYPVDRVYLKKYSDSRITNSERLWDNLYGYDKVLQTAAEKGVSVIQNITQGDAHFQFGDMDIQLYNYENETDSSGELKKIWDDNSNSLISVVKVNGKKIYLGGDLDNVHGAEDKYGPLIGKVDLMKFNHHHDTNKSNTKDFIKNLSPSLIVQTSDSLPWKNGVDSEYVNWLKERGIERINAASKDYDATVFDIRQDGLVNISTSYKPIPSFQAGWHKSAYGNWWYQAPDSTGEYAVGWNEIEGEWYYFNQTGILLQNQWKKWNNHWFYLTDSGASAKNWKKIDGIWYYFNKENQMEIGWVQDKEQWYYLDVDGSMKTGWLQYMGQLYYFAPSGEMKTGWVKDKEAWYYMDSTGIMKTGEIEVAGHHYYLEESGAMKQGWLKKANDWYFYKTGGSRAIGWIKDKDKWYFLKENGQLLVNGKTPEGYTVDSSGAWLVDVPIEKSATIKTTSHSEIKESKEVVKKDLENKETSQHESVTNSSTSQDLTSSTSQSSETSVNKSESEQ

SEQ ID NO: 5138 - protein, 376 aa, Streptococcus pneumoniae
MNNRSETMKYKRIVFKVGTSSLTNEDGSLSRSKVKDITQQLAMLHEAGHELILVSSGAIAAGFGALGFKKRPTKIADKQASAAVGQGLLLEEYTTNLLLRQIVSAQILLTQDDFVDKRRYKNAHQALSVLLNRGAIPIINENDSVVIDEVKVGDNDTLSAQVAAMVQADLLVLLTDVDGLYTGNPNSDPRAKRLERIETINREIIDMAGGAGSSNGTGGMLTKIKAATIATESGVPVYICSSLKSDSMIEAAEETEDGSYFVAQEKGLRTQKQWLAFYAQSQGSIWVDKGAAEALSQHGKSLLLSGIVEAEGAFSYGDIVTVFDKESGKSLGKGRVQFGASALEDMLRSQKAKGVLIYRDDWISITPEIQLLFTEF

SEQ ID NO: 5139 - protein, 420 aa, Streptococcus pneumoniae
MVSRQEQFEQVQAVKKSINTASEEVKNQALLAMADHLVAATEEILAANALDMAAAKGKISDVMLDRLYLDADRIEAMARGIREVVAFPDPIGEVLETSQLENGLVITKKRVAMGVIGIIYESRPNVTSDAAALTLKSGNAVVLRSGKDAYQTTHAIVTALKKGLETTTIHPNVIQLVEDTSHESSYAMMKAKGYLDLLIPRGGAGLINAVVENAIVPVIETGTGIVHVYVDKDADEDKALSIINNAKTSRPSVCNAMEVLLVHEDKAASILPRLDQMLVAERKEAGLEPIQFRLDSKASQFVSGQAAETQDFDTEFLDYVLAVKVVSSLEEAVAHIESHSTHHSDAIVTENAEAAAYFTDQVDSAAVYVNASTRFTDGGQFGLGCEMGISTQKLHARGPMGLKELTSYKYVVAGDGQIRE

SEQ ID NO: 5140 - protein, 265 aa, Streptococcus pneumoniae
MKIGFIGLGNMGASLAKSVLQTRTSDEILLANRSQAKVDAFIADFGGQASSNEEMFAEADVIFLGVKPAQFSELLSQYQTILEKRESLLLISMAAGLTLEKLASLIPSQHRIIRMMPNTPASIGQGVISYALSPNCRAEDSEIFCQLLAKAGLLVELGESLINAATGLAGCGPAFVYLFIEALADAGVQTGLPRETALKMAAQTVVGAGQLVLESQQHPGVLKDQVCSPGGSTIAGVASLEAHAFRGTVMEAVHQAYKRTQELGK

SEQ ID NO: 5141 - protein, 212 aa, Streptococcus pneumoniae [sequence omitted]

SEQ ID NO: 5142 - protein, 83 aa, Streptococcus pneumoniae
LLQRETSINLDNAISLFIQKRKVALTNFFMQVQPFQIQTINLAVTISSNTSQPFFHLDVKIECQIGFEAICRKLIEPVNGFNI

SEQ ID NO: 5143 - protein, 296 aa, Streptococcus pneumoniae
MKQDQLKAWQPAQFDRFVRILEQDQLNHAYLFSGFFGSLEMAQFLAKSLFCTDKVGVLPCEKCRSCKLIEQEEFPDVTLIKPVNQVIKTERIRELVGQFSQAGIESQQQVFIIEQADKMHPNAANSLLKVIEEPQSEVYIFFLTSDEEKMLPTIRSRTQIFHFKKQEEKLILLLEQMGLVKKKATLLAKFSQSRAEAEKLANQASFWTLVDESERLLTWLVAKKKESYLQVAKLANLADDKEKQDQVLRILEVLCGQDLLQVRVRVILQDLLEARKMWQANVSFQNAMEYLVLKEI

SEQ ID NO: 5144 - protein, 105 aa, Streptococcus pneumoniae
MDKKELFDALDDFSQQLLVTLADVEAIKKNLKSLVEENTALRLENSKLRERLGEVEADAPVKAKHVRESVRRIYRDGFHVCNDFYGQRREQDEECMFCDELLYRE

SEQ ID NO: 5145 - protein, 289 aa, Streptococcus pneumoniae
MQIQKSFKGQSPYGKLYLVATPIGNLDDMTFRAIQTLKEVDWIAAEDTRNTGLLLKHFDISTKQISFHEHNAKEKIPDLIGFLKAGQSIAQVSDAGLPSISDPGHDLVKAAIEEEIAVVTVPGASAGISALIASGLAPQPHIFYGFLPRKSGQQKQFFDSKKDYPETQIFYESPHRVADTLENMLEVYGDRSVVLVRELTKIYEEYQRGTISELLESIAETSLKGECLLIVEGASQDVEEKDEEDLFLEIQARIQQGMKKNQAIKEVAKIYQWNKSQLYAAYHDWEEKQ

SEQ ID NO: 5146 - protein, 181 aa, Streptococcus pneumoniae
LINQKEGDFLRTYENKEELKAEIEKTFEKYILEFDNIPENLKDKRADEVDRTPAENLAYQVGWTNLVLKWEEDERKGLQVKTPSDKFKWNQLGELYQWFTDTYAHLSLQELKAKLNENIHSISAMIDSLSEEELFEPHMRKWADEATKTATWEVYKFIHVNTVAPFGTFRTKIRKWKKIVL

SEQ ID NO: 5147 - protein, 167 aa, Streptococcus pneumoniae
MSFKNNWIDKEGRVFIYFTVEEIMKRRNISKPTAIKTLDELDIKKGIGLIERVRLGLGKPNIIYVKDFMSIFQVKENDLQKSKNLTSEVKDFNLRSKENELQEVKNLDSNYIENNKSKYSKREYSFGENGLGTFQNVFLAAEDISDLQIIMNSQLENYIRLPAKLES

SEQ ID NO: 5148 - protein, 149 aa, Streptococcus pneumoniae
KSIALKKELANYSGKKKCYAMKAQAIVTSQGRIVSLDITVNYCHDMKLFKMSRRNIGQAGKILADSGYQGLMKIYPQAQTPRKSSKFKPLTVEDKTYNHALSKERSKVENIFAKVETFKMFSTTYRNHRKRFGLRMNLIAGIINHELGF

SEQ ID NO: 5149 - protein, 133 aa, Streptococcus pneumoniae
MNDEASKQLTDARFKRLVGVQRTTFEEILAVLKTAYQLKHAKGGRKPKLSLEDLLMATLQYVREYRTYEQIAADFGIHESNLIRRSQWVEVTLVQSGVTISRTPLSSEDTVMIIDATEVKINRPKKRISELFW

SEQ ID NO: 5150 - protein, 90 aa, Streptococcus pneumoniae
LFTCFIIHRTTIPYFVSQEVYWKVRNIEAEAIRRNCERGAIFSGKIKHHEDSQFKGDHYVECYAVLDNTVIARDRITVPIDPLCGKDFIE

SEQ ID NO: 5151 - protein, 444 aa, Streptococcus pneumoniae
VSQSYINVIGAGLAGSEAAYQIAERGIPVKLYEMRGVKSTPQHKTDNFAELVCSNSLRGDALTNAVGLLKEEMRRLGSVILESAEATRVPAGGALAVDRDGFSQMVTEKVVNHPLIEVVRDEITELPTDVITVVATGPLTSDALAEKIHALNNGDGFYFYDAAAPIIDVNTIDMSKVYLKSRYDKGEAAYLNAPMTKQEFMDFHEALVNAEEAPLNSFEKEKYFEGCMPIEVMAKRGIKTMLYGPMKPVGLEYPDDYTGPRDGEFKTPYAVVQLRQDNAAGSLYNIVGFQTHLKWGEQKRVFQMIPGLENAEFVRYGVMHRNSYMDSPNLLEQTYRSKKQPNLFFAGQMTGVEGYVESAASGLVAGINAARLFKEESEVIFPETTAIGSLAHYITHADSKHFQPMNVNFGIIKELEGERIRDTKARYEKIAERALADLEEFLTV

SEQ ID NO: 5152 - protein, 245 aa, Streptococcus pneumoniae
MANPKYKRILIKLSGEALAGERGVGIDIQTVQTIAKEIQEVHSLGIEIALVIGGGNLWRGEPAAEAGMDRVQADYTGMLGTVMNALVMADSLQQVGVDTRVQTAIAMQQVAEPYVRGRALRHLEKGRIVIFGAGIGSPYFSTDTTAALRAAEIEADAILMAKNGVDGVYNADPKKDKTAVKFEELTHRDVINKGLRIMDSTASTLSMDNDIDLVVFNMNQSGNIKRVVFGENIGTTVSNNIEEKE

SEQ ID NO: 5153 - protein, 145 aa, Streptococcus pneumoniae
LVRLGHSLFSFFNNYVSHILSYSFSSILFETVVPIFSPNTTRLMLPDWFMLKTTKSMSLSIERVEAVESMIRRPLLITSRWVNSSNLTAVLSFLGSALYTPSTPFLAMRMASASISAARRAAVVSVEKYGEPIPAPKITIRPFSR

SEQ ID NO: 5154 - protein, 185 aa, Streptococcus pneumoniae
MANVIIEKAKERMTQSHQSLAREFGGIRAGRANASLLDRVHVEYYGVETPLNQIASITIPEARVLLVTPFDKSSLKDIERALNASDLGITPANDGSVIRLVIPALTEETRRDLAKEVKKVGENAKVAVRNIRRDAMDEAKKQEKAQEITEDELKTLEKDIQKVTDDAVKHIDDMTANKEKELLEV

SEQ ID NO: 5155 - protein, 138 aa, Streptococcus pneumoniae
LQDLYSYFLLSNKTQPAMPTEFFCLFLDFQKFFLFVSSHVVDVFNSIVCYFLNIFFKSLQFVFSDFLCFFLFLSFVHSIATDIADSHFSIFADLLHFFSKVTTSFFCKSWDNQANHRTVISRCDTKIRSVQGTFDVFQ

SEQ ID NO: 5156 - protein, 284 aa, Streptococcus pneumoniae
MNTNLASFIVGLIIDENDRFYFVQKDGQTYALAKEEGQHTVGDTVKGFAYTDMKQKLRLTTLEVTATQDQFGWGRVTEVRKDLGVFVDTGLPDKEIVVSLDILPELKELWPKKGDQLYIRLEVDKKDRIWGLLAYQEDFQRLARPAYNNMQNQNWPAIVYRLKLSGTFVYLPENNMLGFIHPSERYAEPRLGQVLDARVIGFREVDRTLNLSLKPRSFEMLENDAQMILTYLESNGGFMTLNDKSSPDDIKATFGISKGQFKKALGGLMKAGKIKQDQFGTELI

SEQ ID NO: 5157 - protein, 71 aa, Streptococcus pneumoniae
MRKSFYTWLMTERNPKSNSPKAILADLAFEESAFPKHTDDFDEVSRFLEEHASFSFNLGDFDSIWQEYLEH

SEQ ID NO: 5158 - protein, 322 aa, Streptococcus pneumoniae
LKEHSIDIQLSHPDDLFHLFGSNERHLRLMEEELDVVIHARTEIVQVLGEESACEEARQVIQALMALVNRGMTVGTPDVVTAISMVKNDEIDKFVALYEEEIIKDNTGKPIRVKTLGQKLYVDSVKQHDVTFGIGPAGTGKTFLAVTLAVTALKRGQVKRIILTRPAVEAGESLGFLPGDLKEKVDPYLRPVYDALYQILGKDQTTRLMEREIIEIAPLAYMRGRTLDDAFVILDEAQNTTIMQMKMFLTRLGFHSKMIVNGDISQIDLPRNVKSGLIDAQEKLKNIHQIDFVHFSAKDVVRHPVVAQIIRAYEYSTEVAHD

SEQ ID NO: 5159 - protein, 64 aa, Streptococcus pneumoniae
LFPVIMTQEDALIVISHIKVLSIVPNRCLKPLDKTFSLYNWIFLSQKYILLQANFLKISRVQLQ

SEQ ID NO: 5160 - protein, 166 aa, Streptococcus pneumoniae
MIDQLSKYYSCRILTEKDIPSILSLYESNPLYFQHCPPEPNFATVKEDMLCLPEGKAKADKFFVGFWNGSDLVAVMDFVYAYPDEETVFIGLFMVDQAYQRKGIGSHIVTEALAYFAKNFRKARLAYVKGNPQSQHFWEKQGFKSIGCEVKQELYTVVIVEQSLED

SEQ ID NO: 5161 - protein, 91 aa, Streptococcus pneumoniae
VTTHDEPVYEKHGVLHYTVANIPGAVARTSTIALTNVTLPYIEALAGKGFAQAISEDEGLRQGVTTYQGYLTSLPVAQGLNRDYTDINDLV

SEQ ID NO: 5162 - protein, 64 aa, Streptococcus pneumoniae
TLISNSFNIEASVRDADVVIGAILIPGAKAPELVTDEMVKQMRPGSVSLTLLLTKVALSKQLTV

SEQ ID NO: 5163 - protein, 72 aa, Streptococcus pneumoniae
IGAHFLTKQAGGSGVLPGGVPGVPKGKVTIIGDGVVGTHAARIALGLGAQVTILDISAKRLSVLKEVFGSQI

SEQ ID NO: 5164 - protein, 141 aa, Streptococcus pneumoniae
MLIGIPKEIKNNENRVALTPAGVHSLVSRGHRVLIETNAGLGSGFTDADYQKQGAEIVATAGEAWAAELVVKVKEPLSSEYGYFRDDLLLFTYLHMAAAPELADAMLAAKTTGIAYETVRDNQGQLPLLVPMSEVADRMAV

SEQ ID NO: 5165 - protein, 195 aa, Streptococcus pneumoniae
LIGWKSMESIFVKLAQYPSIETERLLLRPVTLDDAEAMFDYASDKGNTRYTFPTNQSLEETKNNIAQFYLANPLGRWGIELKSNGQFIGTIDLHKIDSVLKKAAIGYIINKKYWNQGLTTEANRAVIELAFEKIGMNKLTALHDKDNPASGKVMEKSGMRFSHAEPYACMDQHEKGRIVTRVHYVLTKEDYFANK

SEQ ID NO: 5166 - protein, 216 aa, Streptococcus pneumoniae
MEAIIEKIKEYKIIVICTGLGLLVGGFFLLKPAPQTPVKETNLQAEVAAVSKDLVSEKEVNKEEKEEPLEQDLITVDVKGAVKSPGIYDLPVGSRVNDAVQKAGGLTEQADSKSLNLAQKVSDEALVYVPTKGEEAVSQQTGLGTASSISKEKKVNLNKASLEELKQVKGLGGKRAQDIIDHREANGKFKSVDELKKVSGIGGKTIEKLKDYVTVD

SEQ ID NO: 5167 - protein, 458 aa, Streptococcus pneumoniae
MLQWIKNFSIPLIYLSFLLLWLYYAIFSASYLALLGFVFLLVCLFFQFPWKSASKVLVICGIFGFWFVFQNWQQSQASQNLADSVERVRILPDTIKVNGDSLSFRGKSNGRAFQVYYKLQSEEEKEAFQALTDLHEIGLEGKLSEPEGQRNFGGFNYQAYLKTQGIYQTLNIKRIQSLQKVGSWDIGEKLSSLRRKAVVWIKMHFPDPMRNYMTGLLLGHLDTDFEEMNELYSSLGIIHLFALSGMQVGFFMNGFKKLVLRLGLTQEKLKWLTYPFSLIYAGLTGFSASVIRSLLQKLLAQHGVKGLDNFALTVLVLFIVMPNFFLTAGGVLSCAYAFILTMTIKEGKGLKAVASESLVISLGILPIISFYFAEFQPWSILLTFVFSFLFDLTLLPLLSILFVLSFLYPVIQLNFIFEWLEGIIRLVSQVTSRPLVFGQPNEWLLTLLLNILWLWSMI

SEQ ID NO: 5168 - protein, 305 aa, Streptococcus pneumoniae
MAFNPIVKYSLALVYDLRKNLKGLTVLSLLITGLFFLTKYPLENEITMLDVGQGESIFLRDVTGKTILIDVGGKAESYKKIEKWQEKMTTSNAQRTLIPYLKSRGVAKIDQLILTNTDKEHVGDLSEVTKAFHVGEILVSKGSLKQKQFVVELQATKTKVRSMTVGENLPIFGSQLEVLSPRKMGDGGHDDTLVLYGKFLDKQFLFTGNLEEKGEKDLLKHYPDLKVNVLKASQHGNKKSSSPAFLEKLKPELTLISVGKSNRMKLPHQETLTRLEGINSKVYRTDQQGAIRFKGLDSWKIESVR

SEQ ID NO: 5169 - protein, 195 aa, Streptococcus pneumoniae
MLQLTHVTLKTRQVILQDADFTFKKGRFYGLLAINGSGKTTLFRAISNLIPISSGNIAAPPSLFYYESIEWLDGNLSGMDYLRLIKNIWKSDLNLRDEIAYWEMADYISLPIRKYSLGMKQRLVIAMYFLSQAKCWLMDEITNGLDEYYRQKFFDRLAQIDRQEQLVLLSSHYKEELVDICDRVVTIHQGQIEEV

SEQ ID NO: 5170 - protein, 391 aa, Streptococcus pneumoniae
MKDVSLFLLKKVFKSRLNWIILLLFASVLGVTFYLNSQTANSHSLESRLESRIAANERAINENEAKLSQMSDTSSEEYQFAKSNLELQKNLLKRKTEILTLLKEGRWKEAYYLQWQDEEKNYEFVSNDPTASSGLKMGVDRERKIYQALYPLNIKAHTLEFPTHGIDQIIWILEAIIPSLFVVAIIFMLTQLFAERYQNHLDTAHLYPVSKVTFAMSSLGVGVGYVTVLFIGICGFSFLVGSLISGFGQLDYPYPIYSLVKQEVTIGKMQDVLFPSLLLAFLAFIVIVEVVYLIAYFFKQKMPVLFLSLIGIVGLLFGIQTIQPLQKIAHLIPFTYLRSVEILSGRLPKQIDNVDLNWSMGMVLLPCLIIFLLLGILFIERWGSSQKKRIF

SEQ ID NO: 5171 - protein, 87 aa, Streptococcus pneumoniae
IYKPARYDSVSSKLFIRRARQLNVTRREALTSAFLNFYMIPSFLALVKIKSYFLKSLCLYFGLVFKSKRENQVDSLSMLVFTYFPYL

SEQ ID NO: 5172 - protein, 195 aa, Streptococcus pneumoniae
VRACIFTSPLLFFSNKTKEVKTIAKQDLFINDEIRVREVRLIGLEGEQLGIKPLSEAQALADNANVDLVLIQPQAKPPVAKIMDYGKFKFEYQKKQKEQRKKQSVVTVKEVRLSPTIDKGDFDTKLRNARKFLEKGNKVKVSIRFKGRMITHKEIGAKVLAEFAEATQDIAIIEQRAKMDGRQMFMQLAPATDKK

SEQ ID NO: 5173 - protein, 66 aa, Streptococcus pneumoniae
MPKQKTHRASAKRFKRTGSGGLKRFRAYTSHRFHGKTKKQRRHLRKASMVHSGDYKRIKAMLTRLK

SEQ ID NO: 5174 - protein, 119 aa, Streptococcus pneumoniae
MARVKGGVVSRKRRKRILKLAKGYYGAKHILFRTAKEQVMNSYYYAYRDRRQKKRDFRKLWITRINAAARMNGLSYSQLMHGLKLAEIEVNRKMLADLAVNDAVAFTALADAAKAKLGK

SEQ ID NO: 5175 - protein, 126 aa, Streptococcus pneumoniae
MASKMLHTCLRVENLEKSIAFYQDAFGFKELRRRDFPDHAFTIVYLGLEGDDYELELTYNYDHGPYVVGDGFAHIALSTPDLEALHQEHSAKGYEVTEPNGLPGTTPNYYFVKDPDGYKVEVIREK

SEQ ID NO: 5176 - protein, 189 aa, Streptococcus pneumoniae
MNLTCKKRLGVIRLETMKVVAQEEIAPAIFELVLEGEMVEAMRAGQFLHLRVPDDAHLLRRPISISSIDKANKQCHLIYRIEGAGTAIFSTLSQGDTLDVMGPQGNGFDLSDLDEQNQVLLVGGGIGVPPLLEVAKELHERGVKVVTVLGFANKDAVILKTELAQYGHVFVTTDDGSYGIKGNVSRCFS

SEQ ID NO: 5177 - protein, 93 aa, Streptococcus pneumoniae
MMVLMASREMFPVVFHDLNSQFEPLYSCGAPLMMKYINQTFDDHPRAYLSLESRMACGMGACYACVLKVPENETVSQRVCEDGPVFRTGTVVL

SEQ ID NO: 5178 - protein, 312 aa, Streptococcus pneumoniae
MTTNRLQVSLPGLDLKNPIIPASGCFGFGQKYAKYYDLDLLGSIMIKATTLEPRFGNPTPRVAETPAGMLNAIGLQNPGLEVVLAEKLPWLEREYPNLPIIANVAGFSKQEYAAVSHGISKATNVKAIELNISCPNVDHCNHGLLIGQDPDLAYDVVKAAVEASEVPVYVKLTPSVTDIVTVAKAAEDAGASGLTMINTLVGMRFDLKTRKPILANGTGGMSGPAVFPVALKLIRQVAQTTDLPIIGMGGVDSTEAALEMYLAGASAIGVGTANFTNPYACPDIIENLPKVMDKYGISSLEELRQEVKESLR

SEQ ID NO: 5179 - protein, 721 aa, Streptococcus pneumoniae
MNLGEFWYNKINKTIGRRLMKKVRFIFLALLFFLASPEGAMASDGTWQGKQYLKEDGSQAANEWVFDTHYQSWFYIKADANYAENEWLKQGDDYFYLKSGGYMAKSEWVEDKGAFYYLDQDGKMKRNAWVGTSYVGATGAKVIEDWVYDSQYDAWFYIKADGQHAEKEWLQIKGKDYYFKSGGYLLTSQWINQAYVNASGAKVQQGWLFDKQYQSWFYIKENGNYADKEWIFENGHYYYLKSGGYMAANEWIWDKESWFYLKFDGKIAEKEWVYDSHSQAWYYFKSGGYMAANEWIWDKESWFYLKFDGKMAEKEWVYDSHSQAWYYFKSGGYMTANEWIWDKESWFYLKSDGKIAEKEWVYDSHSQAWYYFKSGGYMTANEWIWDKESWFYLKSDGKMAEKEWVYDSHSQAWYYFKSGGYMAKNETVDGYQLGSDGKWLGGKATNENAAYYQVVPVTANVYDSDGEKLSYISQGSVVWLDKDRKSDDKRLAITISGLSGYMKTEDLQALDASKDFIPYYESDGHRFYHYVAQNASIPVASHLSDMAVGKKYYSADGLHFDGFKLENPFLFKDLTEATNYSAEELDKVFSLLNINNSLLENKGATFKEAEEHYHINALYLLAHSALESNWGRSKIAKDKNNFFGITAYDTTPYLSAKTFDDVDKGILGATKWIKENYIDRGRTFLGNKASGMNVEYASDPYWGEKIASVMMKINEKLGGKD

SEQ ID NO: 5180 - protein, 560 aa, Streptococcus pneumoniae
MEYNHKERTMSFDGFFLHHIVEELRSELVNGRIQKINQPFEQELVLQIRSNRQSHRLLLSAHPVFGRIQLTQTTFENPAQPSTFIMVLRKYLQGALIESIEQVENDRIVEITVSNKNEIGDHIQATLIIEIMGKHSNILLVDKSSHKILEVIKHVGFSQNSYRTLLPGSTYIAPPSTESLNPFTIKDEKLFEILQTQELTAKNLQSLFQGLGRDTANELERILVSEKLSAFRNFFNQETKPCLTETSFSPVPFANQVGEPFANLSDLLDTYYKDKAERDRVKQQASELIRRVENELQKNRHKLKKQEKELLATDNAEEFRQKGELLTTFLHQVPNDQDQVILDNYYTNQPIMIALDKALTPNQNAQRYFKRYQKLKEAVKYLTDLIEETKATILYLESVETVLNQAGLEEIAEIREELIQTGFIRRRQREKIQKRKKLEQYLASDGKTIIYVGRNNLQNEELTFKMARKEELWFHAKDIPGSHVVISGNLDPSDAVKTDAAELAAYFSQGRLSNLVQVDMIEVKKLNKPTGGKPGFVTYTGQKTLRVTPDSKKIASMKKS

SEQ ID NO: 5181 - protein, 76 aa, Streptococcus pneumoniae
LLLSTSRILLCFPIISIIKVAWIWSPISFLLETVISTIRSFSTCSIDSIRAPCKYFLKTMIKVEGWAGFSKVVWVS

SEQ ID NO: 5182 - protein, 165 aa, Streptococcus pneumoniae
MYIEMVDETGQVSKEMLQQTQEILEFAAKKLGKEDKEMAVTFVTNERSHELNLEYRDTDRPTDVISLEYKPELEIAFDEEDLLENPELAEMMSEFDAYIGELFISIDKAHEQAEEYGHSFEREMGFLAVHGFLHINGYDHYTPEEEAEMFGLQEEILTAYGLTRQ

SEQ ID NO: 5183 - protein, 131 aa, Streptococcus pneumoniae
MDSQDNKRKWKNRDLISSLEFAITGIFTAIKEERNMRKHAVTALVVILAGFGFQVSRIEWLFLLLSIFLVVAFEIINSAIENVVDLASHYHFSMLAKNAKDMAAGAVFVVSLFAALTGALIFLPRIWDLLF

SEQ ID NO: 5184 - protein, 299 aa, Streptococcus pneumoniae
MTFKSGFVAILGRPHVGKSTFLNHVMGAKIAIMSDKAQTTRNKIMGIYTTDKEQIVFIDTPGIHKPKTTLGDFMVESAYSTLREVDTVLFMVPADEARGKGDDMIIERLKAAKVPVILVVNKIDKVHPDQLLSQIDDFRNQMDFKEIVPISALQGNNVSRLVDILSENLDEGFQYFPSDQITDHPERFLVSEMVREKVLHLTREEIPHSVAVVVDSMKRDEETDKVHIRATIMVERDSQKGIIIGKGGAMLKKIGSMARRDIELMLGDKVFLETWVKVKKNWRDKKLDLADFGYNEKEY

SEQ ID NO: 5185 - protein, 274 aa, Streptococcus pneumoniae
MPELPEVETVCRGLEKLIIGKKISSIEIRYPKMIKTDLEEFQRELPSQIIESMGRRGKYLLFYLTDKVLISHLRMEGKYFYYPDQGPERKHAHVFFHFEDGGTLVYEDVRKFGTMELLVPDLLDAYFISKKLGPEPSEQDFDLQVFQSALAKSKKPIKSHLLNQTLVAGLGNIYVDEVLWRAQVHPARPSQTLTAEEATAIHDQTIAVLGQAVEKGGSTIRTYTNAFGEDGSMQDFHQVYDKTGQECVRCGTIIEKIQLGGRGTHFCPNCQRKD

SEQ ID NO: 5186 - protein, 60 aa, Streptococcus pneumoniae
LVDEWVGNPMVESPCCFRKFVTVDLPEAIPPVIPMIFPISPSFDSLDKSGFHVRLVEFSQ

SEQ ID NO: 5187 - protein, 202 aa, Streptococcus pneumoniae
MGKIIGITGGIASGKSTVTNFLKQQGLSTIGLPTHSSTNYRKPGGRLFEALVQHFGQEIILENGELNRPLIASLIFSNPEEQKWSNQIQGEIIREELATLREQLAQTEEIFFMDIPLLFEQDYSDWFAETWLVYVDRDAQVERLMKRDQLSKDEAESRMAAQWPLEKKKDLASQVLDNNGNQNQLLNQVHILLEGGRQDDRD

SEQ ID NO: 5188 - protein, 66 aa, Streptococcus pneumoniae
MGIKGTTKEILAPVRKLPNQAIRRLSFQLISVILPTSLKKDMHLIKKLVLIAIIIKNLAGQIFLFF

SEQ ID NO: 5189 - protein, 399 aa, Streptococcus pneumoniae
MTEINWKDNLRIAWFGNFLTGASISLVVPFMPIFVENLCVWSQQVAFYAGLAISVSAISAALFSPIWGILADKYGRKPMMIRAGLAMTITMGGLAFVPNIYWLIFLRLLNGVFAGFVPNATALIASQVPKEKSGSALGTLSTGVVAGTLTGPFIGGFIAELFGIRTVFLLVGSFLFLAAILTICFIKEDFQPVAKEKAIPTKELFTSVKYPYLLLNLFLTSFVIQFSAQSIGPILALYVRDLGQTENLLFVSGLIVSSMGFSSMMSAGVMGKLGDKVGNHRLLVVAQFYSVIIYLLCANASSPLQLGLYRFLFGLGTGALIPGVNALLSKMTPKAGISRVFAFNQVFFYLGGVVGPMAGSAVAGQFGYHAVFYATSLCVAFSCLFNLIQFRTLLKVKEI

SEQ ID NO: 5190 - protein, 49 aa, Streptococcus pneumoniae
VRVKINLKCSSCGSINYLTSKNSKTHPDKIEVLKYCPKERKVTLHLESK

SEQ ID NO: 5191 - protein, 77 aa, Streptococcus pneumoniae
MYNLLLTILLVLSVVIVIAIFMQPTKNQSSNVFDASSGDLFERSKARGFEAVMQRLTGILVFFWLAIALALTVLSSR

SEQ ID NO: 5192 - protein, 784 aa, Streptococcus pneumoniae
MKDRIKEYLQDKGKVTVNDLAQALGKDSSKDFRELIKTLSLMERKHQIRFEEDGSLTLEIKKKHEITLKGIFHAHKNGFGFVSLEGEEDDLFVGKNDVNYAIDGDTVEVVIKKVADRNKGTAAEAKIIDILEHSLTTVVGQIVLDQEKPKYAGYIRSKNQKISQPIYVKKPALKLEGTEVLKVFIDKYPSKKHDFFVASVLDVVGHSTDVGIDVLEVLESMDIVSEFPEAVVKEAESVPDAPSQKDMEGRLDLRDEITFTIDGADAKDLDDAVHIKALKNGNLELGVHIADVSYYVTEGSALDKEALNRATSVYVTDRVVPMLPERLSNGICSLNPQVDRLTQSAIMEIDKHGRVVNYTITQTVIKTSFRMTYSDVNDILAGDEEKRKEYHKIVSSIELMAKLHETLENMRVKRGALNFDTNEAKILVDKQGKPVDIVLRQRGIAERMIESFMLMANETVAEHFSKLDLPFIYRIHEEPKAEKVQKFIDYASSFGLRIYGTASEISQEALQDIMRAVEGEPYADVLSMMLLRSMQQACYSEHNHGHYGLAADYYTHFTSPIRRYPDLLVHRMIRDYGRSKEIAEHFEQVIPEIATQSSNRERRAIEAEREVEAMKKAEYMEEYVGEEYDAVVSSIVKFGLFVELPNTVEGLIHITNLPEFYHFNERDLTLRGEKSGITFRVGQQIRIRVERADKMTGEIDFSFVPSEFDVIEKGLKQSSRSGRGRGSNRRSDKKEDKRKSGRSNDKRKHSQKDKKKKGKKSFYKEVAKKGAKHGKGRGKGRRTK

SEQ ID NO: 5193 - protein, 155 aa, Streptococcus pneumoniae
MAKGEGKVVAQNKKARHDYTIVDTLEAGMVLTGTEIKSVRAARINLKDGFAQVKNGEVWLSNVHIAPYEEGNIWNQEPERRRKLLLHKKQIQKLEQETKGTGMTLVPLKVYIKDGYAKLLLGLAKGKHDYDKRESIKRREQNRDIARVMKAVNQR

SEQ ID NO: 5194 - protein, 286 aa, Streptococcus pneumoniae
MEKLVAYKRMPLWNKQTMPEAVQQKHNTKVGTWGKITVLKGALKFIELTEEGEVLAEHLFEAGADNPMAQPQAWHRVEAATDDVEWYLEFYCKPEDYFAKKYNTNPVHSEVLEAMQTVKQGKALDLGCGQGRNSLFLAQQDFDVTAVDQNGLALEILQSIVEQEDLDMPVDLYDINSASIEQEYDFIVSTVVLMFLQADRIPAIIQNMQEKTSVGGYNLIVCAMDTEDYPCSVNFPFTFKEGELADYYKDWELVKYNENPGHLHRRDENGNRIQLRFATLLAKKIK

SEQ ID NO: 5195 - protein, 128 aa, Streptococcus pneumoniae
LLKSCKALWSRKIWTCLLTFTISIQLALNKNMILSFQQLFSCFYKRTAFQLLFKICRRKPVLVVTTLSFVPWTRRIILARLTSHSPLKKENWQTITRIGNWLSTMKIQAICTVAMRMAIVFNYALRPY

SEQ ID NO: 5196 - protein, 73 aa, Streptococcus pneumoniae
RKWIWPPQAGQVYACFSSLSSNTFTNSPLVSLATNMNSLLFYIIRKKEKRSGKFLIFMCVYLIFLASKVAKRS

SEQ ID NO: 5197 - protein, 317 aa, Streptococcus pneumoniae
MFVARDTRGELVNVLEDKLEKQAYTCPACGGQIHLRQGPSVRTHFAHKSLKDCDFFFENESPEHIANKESLYHWLKKETKVQLEYPLSELKQIADVFVNGNLALEVQCSPLPQKVLKERSEGYRSQGYQVLWLLGQKLWLKERLTRLQQGFLYFSQNMGFYVWELDKEKQVLRLKYLIYQDLRGKLHYQIKEFSYGQGSLLEILRLPYKRQKISHFTVSEDKDICRYIRQQLYYQNLFWMKEQAEAYQKGENILTYGLKEWYPQIRPIVGKFFQIEQDLTSYYRNFYTYYQKNPQNDWQKLYPPAFYQQYFLKNMVE

SEQ ID NO: 5198 - protein, 600 aa, Streptococcus pneumoniae
MVLQRNEINEKDTWDLSTIYPTDQAWEEALKDLTEQLETVAQYEGHLLDSADNLLEITEFSLEMERQMEKLYVYAHMKNDQDTREAKYQEYYAKAMTLYSQLDQAFSFYEPEFMEISEKQYADFLEAQPKLQVYQHYFDKLLQGKDHVLSQREEELLAGAGEIFGSASETFSILDNADIVFPYVLDDDGKEVQLSHGTYTRLMESKKREVRRGAYQALYATYEQFQHTYAKTLQTNVKVQNYRAKVRNYKSARHAALAANFVPESVYDNLVAAVRKHLPLLHRYLELRSKILGISDLKMYDVYTPLSSVEYSFTYQEALKKAEDALAVLGEDYLSRVKRAFSERWIDVYENQGKRSGAYSGGSYDTNAFMLLNWQDNLDNLFTLVHETGHSMHSSYTRETQPYVYGDYSIFLAEIASTTNENILTEKLLEEVEDDATRFAILNNFLDGFRGTVFRQTQFAEFEHAIHQADQNGEVLTSDFLNKLYADLNQEYYGLSKEDNPEIQYEWARIPHFYYNYYVYQYSTGFAAASALAEKIVHGSQEDRDRYIDYLKAGKSDYPLNVMRKAGVDMEKEDYLNDAFAVFERRLNEFEALVEKLGLA

SEQ ID NO: 5199 - protein, 237 aa, Streptococcus pneumoniae
MVESYSKNANHNMRRPVVKEEIVDLMRQRQKQVTGFLKELEDFARKENIPIIPHETVAYFRFLMETMQPKNILEIGTAIGFSALLMAEHAPNAKITTIDRNPEMIGFAKENFAQFDSRKQITLLEGDAVDVLSTLTESYDFVFMDSAKSKYIVFLPEILKHLEVGGVVVLDDIFQGGDVAKDIMEVRRGQRTIYRGLQKLFDATLDNPELTATLVPLGDGILMLRKNVADVQLSESE

SEQ ID NO: 5200 - protein, 313 aa, Streptococcus pneumoniae
MKKKLLAGAITLLSVATLAACSKGSEGADLISMKGDVITEHQFYEQVKNNPSAQQVLLNMTIQKVFEKQYGSELDDKEVDDTIAEEKKQYGENYQRVLSQAGMTLETRKAQIRTSKLVELAVKKVAEAELTDEAYKKAFDEYTPDVTAQIIRLNNEDKAKEVLEKAKAEGADFAQLAKDNSTDEKTKENGGEITFDSASTEVPEQVKKAAFALDVDGVSDVITATGTQAYSSQYYIVKLTKKTEKSSNIDDYKEKLKTVILTQKQNDSTFVQSIIGKELQAANIKVKDQAFQNIFTQYIGGGDSSSSSSTSNE

SEQ ID NO: 5201 - protein, 113 aa, Streptococcus pneumoniae
MLEQAFKEKHYENTILHSDQGWQYQHDSYHRFLESKGIQASMSRKGNSQDNGRMESFFGILKSEMFYGYEQTFKSLNQLEQAIIDYIDYYNNKRIKIKLKGLSSVQYRTKSFG

SEQ ID NO: 5202 - protein, 190 aa, Streptococcus pneumoniae; identical to SEQ ID NO: 2680

SEQ ID NO: 5203 - protein, 90 aa, Streptococcus pneumoniae
KQLCTILDSLFYTKMSREEKVKVYAQTLHIRTLAYPFYGILHYPLKLPDSYPSKIYSNHVSFTLYMLVTSQVLSATSKLFFEQPTASFLV

SEQ ID NO: 5204 - protein, 63 aa, Streptococcus pneumoniae
IDLNSQIILFSSYFILLYNPVEKTRVHIKKVLASCNTFLRGSFILFLFQLTISPMVLVQKARL

SEQ ID NO: 5205 - protein, 206 aa, Streptococcus pneumoniae
MKLYFVRHGRTLWNQEGRFQGASGDSPLLPESIETLKRLGQYLKEIPFDQIYSSDLPRAVKSAEIIQSQLYTPCSLEIVPNLREWQLGKLEGLKIATLEAIYPQQIQAFRSNLAQFDTRMFGAESLYSTTQRTIQFIKSLKDSPAERILIVGHGANLTASLRTLLGYKEPLLRKDGGLANASLTIIETHDFETFTLNTWNDTSYQS

SEQ ID NO: 5206 - protein, 160 aa, Streptococcus pneumoniae
MAKKVKIKKTLVEQILSKAAIPHQGIQINALEGELPQGYERDQIFKTLALLGDKTGPIIGIVPITQHLSEKKLAKISGNKKVSMIPQKDLEKTTGYIHGANNPVGIRQKHNYPIFIDKIALDLDRMIVSAGEVGHSIIVAPQDLASFVKADFVDILEDIK

SEQ ID NO: 5207 - protein, 280 aa, Streptococcus pneumoniae
MLSWLARVIKGIVIALGFILPGISGGVLAAILGIYERMIGFLAHPFKDFKENVLYFIPVAIGMLLGIGLFSYPIEYLLENYQVFVLWSFAGAIIGTVPSLLKESTRESDRDKIDLAWLWTTFIISGLGLYALNFVVGTLSASFLNFVLAGALLALGVLVPGLSPSNLLLILGLYAPMLTGFKTFDLLGTFFPIGIGAGATLIVFSKLMDYALNNYHSRVYHFIIGIVLSSTLLILIPNAGNAESIQYTGLSLVGYVIIAFFFALGIWLGIWMSQLEDKYK

SEQ ID NO: 5208 - protein, 262 aa, Streptococcus pneumoniae
MRKQIHPLILFSFFGIMMFILIINRPLNDSQSFKTKSNIAQALKHLDKPIIDLSGWQRPEEINYDALSQNISGAIVRVHSGAQTTKENDASFINGIDKAYKSHITELQKRNVPVAVYAYVAGKSVQEMEKAAEVFYNAASPYSPSYYWLDVENKTMSNMNEGVENFRAKLASLGAKNIGIYVGVYFMEETRIDTGKFTSVWIPSYGSNSGFLESSPKTDLDYDIHQYTSKGKIAGFDHDLDINVISPLKNKEETFRKLFLKP

SEQ ID NO: 5209 - protein, 459 aa, Streptococcus pneumoniae
MSNFAIILAAGKGTRMKSDLPKVLHKVAGISMLEHVFRSVGAIQPEKTVTVVGHKAELVEEVLAGQTEFVTQSEQLGTGHAVMMTEPILEGLSGHTLVIAGDTPLITGESLKNLIDFHINHKNVATILTAETDNPFGYGRIVRNDNAEVLRIVEQKDATDFEKQIKEINTGTYVFDNERLFEALKNINTNNAQGEYYITDVIGIFRETGEKVGAYTLKDFDESLGVNDRVALATAESVMRRRINHKHMVNGVSFVNPEATYIDIDVEIAPEVQIEANVILKGQTKIGAETVLTNGTYVVDSTIGAGAVITNSMIEESSVADGVTVGPYAHIRPNSSLGAQVHIGNFVEVKGSSIGENTKAGHLTYIGNCEVGSNVNFGAGTITVNYDGKNKYKTVIGVNVFVGSNSTIIAPVELGDNSLVGAGSTITKDVPADAIAIGRGRQINKDEYATRLPHHPKNQ

SEQ ID NO: 5210 - protein, 181 aa, Streptococcus pneumoniae
MEFEEKTLSRKEIYQGPIFKLVQDQVELPEGKGTARRDLIFHNGAVCVLAVTDEQKLILVKQYRKAIEAVSYEIPAGKLEVGENTAPVAAALRELEEETAYTGKLELLYDFYSAIGFCNEKLKLYLASDLTKVENPRPQDEDETLEVLEVSLEEAKELIQSGHICDAKTIMAVQYWELQKK

SEQ ID NO: 5211 - protein, 104 aa, Streptococcus pneumoniae
MGKSLLTDEMIERANRGEKISGPPLLDDNEETKILPTSSSRFGYANPKDHGFSQETLKIQVEPSIHKSRRIENTKRNVFNSKLNKILFAVIFLLILLVLAMKLL

SEQ ID NO: 5212 - protein, 230 aa, Streptococcus pneumoniae
MKIGIIAAMPEELAYLVQHLDNTQEQVVLRNTYHTGTIASHEVVLVESGIGKVMSAMSVAILADHFQVDALINTGSAGAVAEGIAVGDVVIADKLAYHDVDVTAFGYAYGQMAQQPLYFESDKTFVAQIQESLSQLDQNWHLGLIATGDSFVAGNDKIEAIKSHFPEVLAVEMEGAAIAQAAHALNLPVLVIRAMSDNANHEANIFFDEFIIEAGRRSAQVLLTFLKALD

SEQ ID NO: 5213 - protein, 163 aa, Streptococcus pneumoniae
MSIEMTVSEIAEVLGLSRQAINNRVKELPEEDTDKNDKGVTVVTRSGLIKLEEIYKKTIFEDEPVSEDVKQRELMEILVDEKNAEILRLYEQLKAKDRQLSEKDEQMRIKDRQIAEKDKQLDQQQQLTLQAMKDQENLKLELDQAKEEVQSTKKGFFARLFGG

SEQ ID NO: 5214 - protein, 196 aa, Streptococcus pneumoniae
MERLEDYIAFDLEFNQHEGQTHLIQVSAVRFRDGREIDAYDSYVHTSVPLKSFINGLTGITAETLKDAPPVEKVLEEFQEFVGSLLMIGYNAAKSDLPILAEHGLDYSQQYKVDLYDEAFERRSSDLHGIANLKLQTVASFLGFQGQSHNSLEDARMTARVYESFLESDQARELLETESSLSNNPFGGLDLSQLFD

SEQ ID NO: 5215 - protein, 256 aa, Streptococcus pneumoniae
MVHLPQLISHRGVSNANGIQNTVESLETTAQLKPDLVETDVQETKDGQFVMMHDANLKNLAGINKSPQDLNLEELKGIDIFENGYQTKISSFEDYLSRANELGQKLLIEIKTSKKDSPDMMNRFLARYAAMLKIYGHQIQSLDYHVVEKVRQYDAELPVYFIMPYNSVFPKTRATGYTMEYSTLDEYFVSKLWTTDQKLYVWTVNDSEAISKSLHLGVDGVITDDLEKVQREIEVAQEDPEYTDLLLKKALEFFEF

SEQ ID NO: 5216 - protein, 115 aa, Streptococcus pneumoniae; identical to SEQ ID NO: 4727

SEQ ID NO: 5217 - protein, 46 aa, Streptococcus pneumoniae
LVAGLTNGELIAPMTYEEMMTSDFFEVWFQKFFLPTLTTPSVIIVK

SEQ ID NO: 5218 - protein, 66 aa, Streptococcus pneumoniae
VVASASASSTSTQAQEQVDKSELRALSQELDQRLKALATISDPKIDATKAVLLDAQKAPEDSALTE

SEQ ID NO: 5219 - protein, 210 aa, Streptococcus pneumoniae
MFYLSLSRIALSSSTSLVSVSAEPFSSFTKSRVSWRRFWALARTFLSAFSASSCPRTLINSVLNCWISDSFLRRISQKAITPRRASRLTTITPAGTEFVSVILSESLLSSVPCFASFLSCAGLLSLAFAFTSLRESKAAQPSQTLLQYADLTLSRHYLPELFEHLGGQPWLHRFSDQILLPKLSSVGLTLDSRHEVQTCQLALELVCSLS

SEQ ID NO: 5220 - protein, 99 aa, Streptococcus pneumoniae
MTETNSVPAGVIVVSLLALLGVIAFWLIRRKKESEIQQLSTELIKVLGQLDAEKADKKVLAKAQNLLQETLDFVKEENGSAETETKLVEELKAILDKLK

SEQ ID NO: 5221 - protein, 235 aa, Streptococcus pneumoniae
LETIVFLISVFLAGVLSFFSPCIFPLLPVYAGILLDDQESAKSFSLFGRKVLWSGLIRTLCFIAGISLIFFILGFGAGYFGHILYANWFRYGMGAIIIILGLHQMEIFHLKKLEVQKSFTFKKSDSNRYWSAFLLGITFSFGWTPCIGPVLSSVLALAASGGNGAWQGAIYTLIYTLGMALPFLVLALASGLVMPYFSKIKRHMMLLKKIGGFLIVLMGILLLLGQVNVLAGIFE

SEQ ID NO: 5222 - protein, 185 aa, Streptococcus pneumoniae
MKKVMFAGLSLLSLVVLMACGEEETKKTQAAQQPKQQTTVQQIAVGKDAPDFTLQSMDGKEVKLSDFKGKKVYLKFWASWCGPCKKSMPELMELAAKPDRDFEILTVIAPGIQGEKTVEQFPQWFQEQGYKDIPVLYDTKATTFQAYQIRSIPTEYLIDSQGKIGKIQFGAISNADAEAAFKEMN

SEQ ID NO: 5223 - protein, 463 aa, Streptococcus pneumoniae
MNIFRTKNVSLDKTEMHRHLKLWDLILLGIGAMVGTGVFTITGTAAATLAGPALVISIVISALCVGLSALFFAEFASRVPATGGAYSYLYAILGEFPAWLAGWLTMMEFMTAISGVASGWAAYFKGLLSQYGIAFPQALNGTFNPQAGTFVDLLPILVLVLVTSLVLLNAKAALRFNSILVILKFSALALFVLVGIWNIKFDNWSNFAPYGFGQIYGASTGIMAGASLMFFGFLGFESISMAVDEVKTPQKNIPRGIVLSLSIVTILYALVTLVLTGVVHYSHLNVDDAVAFALRSVGISWAANYVSLVAILTLITVCISMTYALSRMIYSLARDGLVPAAFKELTKTSKIPKNATILTGLASAVAAGMFPLASIAAFLNICTLAYLIMLAYGLIRLRKEKGMPKAGEFKTPLVPLLPILSIIICLSFMLQYNMNTWIAFLVALLVGSIIYFTYGYKHSTIEE

SEQ ID NO: 5224 - protein, 307 aa, Streptococcus pneumoniae
  UNSURE (203): Xaa at each above location is unknown.
LFMKKQNLFLVLLSVFLLCLGACGQKESQTGKGMKIVTSFYPIYAMVKEVSGDLNDVRMIQSSSGIHSFEPSANDIAAIYDADVFVYHSHTLESWAGSLDPNLKKSKVKVLEASEGMTLERVPGLEDVEAGDGVDEKTLYDPHTWLDPEKAGEDTQIIADKLSEVDSEHKETYQKNAQAFIKKAQELTKKFQPKFEKATQKTXVTQHTAFSYLAKRFGLNQLGIAGISPEQEPSPRQLTEIQEFVKTYKVKTIFTESNASSKVAETLVKSTGVGLKTLNPLEADPQNDKTYLENLEENMSVLAEELK

SEQ ID NO: 5225 - protein, 838 aa, Streptococcus pneumoniae
MKINKKYLAGSVAVLALSVCSYELGRHQAGQVKKESNRVSYIDGDQAGQKAENLTPDEVSKREGINAEQIVIKITDQGYVTSHGDHYHYYNGKVPYDAIISEELLMKDPNYQLKDSDIVNEIKGGYVIKVDGKYYVYLKDAAHADNIRTKEEIKRQKQEHSHNHNSRADNAVAAARAQGRYTTDDGYIFNASDIIEDTGDAYIVPHGDHYHYIPKNELSASELAAAEAYWNGKQGSRPSSSSSYNANPVQPRLSENHNLTVTPTYHQNQGENISSLLRELYAKPLSERHVESDGLIFDPAQITSRTARGVAVPHGNHYHFIPYEQMSELEKRIARIIPLRYRSNHWVPDSRPEQPSPQSTPEPSPSLQPAPNPQPAPSNPIDEKLVKEAVRKVGDGYVFEENGVSRYIPAKDLSAETAAGIDSKLAKQESLSHKLGAKKTDLPSSDREFYNKAYDLLARIHQDLLDNKGRQVDFEVLDNLLERLKDVSSDKVKLVDDILAFLAPIRHPERLGKPNAQITYTDDEIQVAKLAGKYTTEDGYIFDPRDITSDEGDAYVTPHMTHSHWIKKDSLSEAERAAAQAYAKEKGLTPPSTDHQDSGNTEAKGAEAIYNRVKAAKKVPLDRMPYNLQYTVEVKNGSLIIPHYDHYHNIKFEWFDEGLYEAPKGYSLEDLLATVKYYVEHPNERPHSDNGFGNASDHVRKNKADQDSKPDEDKEHDEVSEPTHPESDEKENHAGLNPSADNLYKPSTDTEETEEEAEDTTDEAEIPQVENSVINAKIADAEALLEKVTDPSIRQNAMETLTGLKSSLLLGTKDNNTISAEVDSLLALLKESQPAPIQ

SEQ ID NO: 5226 - protein, 1039 aa, Streptococcus pneumoniae
MKFSKKYIAAGSAVIVSLSLCAYALNQHRSQENKDNNRVSYVDGSQSSQKSENLTPDQVSQKEGIQAEQIVIKITDQGYVTSHGDHYHYYNGKVPYDALFSEELLMKDPNYQLKDADIVNEVKGGYIIKVDGKYYVYLKDAAHADNVRTKDEINRQKQEHVKDNEKVNSNVAVARSQGRYTTNDGYVFNPADIIEDTGNAYIVPHGGHYHYIPKSDLSASELAAAKAHLAGKNMQPSQLSYSSTASDNNTQSVAKGSTSKPANKSENLQSLLKELYDSPSAQRYSESDGLVFDPAKIISRTPNGVAIPHGDHYHFIPYSKLSALEEKIARMVPISGTGSTVSTNAKPNEVVSSLGSLSSNPSSLTTSKELSSASDGYIFNPKDIVEETATAYIVRHGDHFHYIPKSNQIGQPTLPNNSLATPSPSLPINPGTSHEKHEEDGYGFDANRIIAEDESGFVMSHGDHNHYFFKKDLTEEQIKAAQKHLEEVKTSHNGLDSLSSHEQDYPGNAKEMKDLDKKIEEKIAGIMKQYGVKRESIVVNKEKNAIIYPHGDHHHADPIDEHKPVGIGHSHSNYELFKPEEGVAKKEGNKVYTGEELTNVVNLLKNSTFNNQNFTLANGQKRVSFSFPPELEKKLGINMLVKLITPDGKVLEKVSGKVFGEGVGNIANFELDQPYLPGQTFKYTIASKDYPEVSYDGTFTVPTSLAYKMASQTIFYPFHAGDTYLRVNPQFAVPKGTDALVRVFDEFHGNAYLENNYKVGEIKLPIPKLNQGTTRTAGNKIPVTFMANAYLDNQSTYIVEVPILEKENQTDKPSILPQFKRNKAQENSKLDEKVEEPKTSEKVEKEKLSETGNSTSNSTLEEVPTVDPVQEKVAKFAESYGMKLENVLFNMDGTIELYLPSGEVIKKNMADFTGEAPQGNGENKPSENGKVSTGTVENQPTENKPADSLPEAPNEKPVKPENSTDNGMLNPEGNVGSDPMLDPALEEAPAVDPVQEKLEKFTASYGLGLDSVIFNMDGTIELRLPSGEVIKKNLSDFIA

SEQ ID NO: 5227 - protein, 62 aa, Streptococcus pneumoniae
NSPKVRVLFLTFERTSFLIQTFSTAIPYAMKSDKFFFITSPLGNLNSIVPSILNITLSKPNP

SEQ ID NO: 5228 - protein, 62 aa, Streptococcus pneumoniae
VSQKEGIQAKQIVIKITDQGYVTSHGDHYRYYNGKVPFDALFSEELLMKAPNYQPKDQDIVS

SEQ ID NO: 5229 - protein, 66 aa, Streptococcus pneumoniae
VKGGYIIKVDGKYYVYLKDQAHAENVRTKDEINRQKQEHGKDDKGASAEVSVAKLQGRYTTDDGYI

SEQ ID NO: 5230 - protein, 160 aa, Streptococcus pneumoniae
LSVTPNNGVSAADDGYVFNPNDIVRDTGDAYIVRHGDHYHYIPKSSLNNPPSHSNTEEAGSSSSSVLSNPSLHVHHEEEDGHGFDANRIISEDSEGFVIPHGDHNHYIKVQTKGYEAALKNKIPSLQSNYQPGTFDEKAVLAKVDQLLADSRSIYKDRLS

SEQ ID NO: 5231 - protein, 79 aa, Streptococcus pneumoniae
LSDSFFMDLFQELICLAQKTFYFFLAICRRLLVAIYHVLLKQESYNPRLQGLTEIRNPDKTMFVQDAIRFAQQHGFNML

SEQ ID NO: 5232 - protein, 85 aa, Streptococcus pneumoniae
LSKANQLLEQIHEEGIRQSLAEEVENLKAATNKVDADLDEVNSQVKDVLTRIASALQQEKENAEQDSQTLVLYQKLYDILMSLRK

SEQ ID NO: 5233 - protein, 144 aa, Streptococcus pneumoniae
MLSKILRHLYSIKNSTIFSCRLESNNGSDADFDKVDALLDQLSANSKDKTALLESTKAILVLNHQIQSKASASEETSPARNAEANGDNTSAENQPNATAESNIETASDENKPSNTRDSKPAESTSENKTTESSTTTGNQEKPVE

SEQ ID NO: 5234 - protein, 407 aa, Streptococcus pneumoniae
MTYPNLLDRFLTYVKVNTRSDEHSTTTPSTQSQVDFATNVLIPEMKRVGLQNVYYLPNGFAIGTLPANDPSLTRKIGFISHMDTADFNAEGVNPQVIENYDGGVIELGNSGFKLDPADFKSLEKYPGQTLITTDGTTLLGADDKSGIAEIMTAIEYLTAHPEIKHCEIRVGFGPDEEIGVGANKFDAEDFDVDFAYTVDGGPLGELQYETFSAAGAELHFQGRNVHPGTAKGQMVNALQLAIDFHNQLPENDRPELTEGYQGFYHLMDVTGSVEEARASYIIRDFEKDAFEARKASMQSIADKMNEELGSNRVTLNLTDQYYNMKEVIEKDMTPITVAKAVMEDLGITPIIEPIRGGTDGSKISFMGIPTPNIFAGGENMHGRFEYVSLQTMERAVDTIIGIVAYKG

SEQ ID NO: 5235 - protein, 364 aa, Streptococcus pneumoniae
MKKAILMMTFGSPEEITFEGVADFFTNIRRGVRPQDHEIQTLYDNYVRIGGTPLQKITRQEVALVEARLGNEYSVYFANKFSSPFIPDVIGQMEADGIEQCICLILEPHYSFYSVMGYEKFLESKQIQFLVIKDWYQEEALLNYWVDEIAKILKEEVKQDSCKVIFSAHSVPIFALDFGDPYIDQIFENSKLVAEKLGLSSEQYTNTWQSESDIGIPWIKPDVLEYLREQTEHPDHYIFVPISFISEHIEVLFDNDVECYDLCQEFGVNYHRPPMPNTDSRLIDALVNTVRVNENQEFKEFLPEEETFDELVPSDETKNILAESEDLQMPEFVKKLIEKKGRENVKMPYLIKKMLEKAGKLPKE

SEQ ID NO: 5236 - protein, 125 aa, Streptococcus pneumoniae
MLKNLKSFLLRGNVIDLAVGVVIASAFGAIVTSLVNDIITPLILNPALKAAKVERIAQLSWHGVGYGNFLSAIINFIFVGTALFFIIKGIEKAQKLTGIKKEKTAEKKPTELEVLQEIKALLEKK

SEQ ID NO: 5237 - protein, 86 aa, Streptococcus pneumoniae
SQIDPVVFKPKKENSFIRLRKIFSCWPFYFSVRLVFNFFLVTQFPHIIGQFVTENIDKIKAIETIIAQIFIIIINYILSKAYIFRK

SEQ ID NO: 5238 - protein, 128 aa, Streptococcus pneumoniae
MMSQKIIGIDLGGTSIKFAILTTAGEIQGKWSIKTNILDEGSHIVDDMIESIQHRLDLLGLAAADFQGIGMGSPGVVDRDKGTVIGAYNLNWKTLQPIKQKIEKALGIPFFIDNDANVAALGERWMGA

SEQ ID NO: 5239 - protein, 87 aa, Streptococcus pneumoniae
MVKWLSMNGLMVDVIMLALTEFGRKVKQVQFLLVMIAIVNISAALGKAKSYNSLFHMSKKRMYRQLTSDFDKFSNDAAQYAIDHLDN

SEQ ID NO: 5240 - protein, 272 aa, Streptococcus pneumoniae
LSTIDKSGVLPFSAQTVQADIQTLTPMAKYYIILPKDAEIYKTWRGTVNIPIIDATKTTPELSYFKEDHRNYIANENKSGANYIEWKGTVEEFKEAIKKLTDKKSTTATPKKDEKPTPKPDEKPKPTPTVQSGWVGSSYYQDGKKVISKWIFDKKYNSYFYLDASGNYVQNAWVGNYYLKSGGYMAKGEWVYDATYQAWYYLTSDGSYAYSTWQGNYYLKSDGKMAVNEWVDGGRYYVGADGVWKEGQASTVSSSNDSNSEYFCCFRKGKKL

SEQ ID NO: 5241 - protein, 509 aa, Streptococcus pneumoniae
LMKSKIVLGASLAIATLSLVSLVEIEGLSPFLIENVSANTHSANKVINHKVSIYLENADEGKGLTVNFSTDSVSPNLFDEFEKKSGITITTMLVNAKTGEVVEKRLTPSVFLRSNDLTSGTISSFIFSEYPDGEYKYVVSKGDFIDPKTQFKHQYRGESPVFRIRNRKYVELGTTDKKLDERRDNSVYKDGVVEHKVNLSLTSYQGGNGVTAIFSTDSVNSNLLNSFGEKAKKVLIRSKLINVKTGEVIDETFSPKVSLTSKILKSGSTAVFYFIDLTDGEYKYVAYESQQYTDPQTTLTHQYRGESPIFSIKDGKFSGLVSASKPDENPKPTPKPDEKPKPSAPQQEKPKPTVQSGWVGSSYYQNGKKVTSKWIFDKKYNSYFYLDASGNYVQNAWVGNYYLKSGGYMAKSEWIYDKNYGSYYYLTSEGSYARNTWSGNYYLKSNGKMAKSEWVYDSNYKSYYYLTSEGSYARNTWVGNYYLKSNGKMAVNERTPDGYRVDGSGKWVK

SEQ ID NO: 5242 - protein, 573 aa, Streptococcus pneumoniae
MHRKTVIDFRTLGERYTFTKPIKELKTRNVEEVADLLAQVESYQEQGYYVVGYVSYEAAPAFEEKLAVHKDPLLGEYLLYFTVHDSVETSSIPLTYEDIDLPSNWQEVTSAADYEKAIAQIHHHLRQGDTYQVNYTVQLKQKLNANPFAIYNRMVVEQEAGYNAYVEHDEMAVISMSPELFFEQNDRELTTRPMKGTTQRGVTDQEDLEQASWLEQDPKNRSENMMIVDLLRNDMNRISEVGSEHVERLCQVEQYSTVWQMTSTIKSQLREDVDLVEIFRSLFPCGSITGAPKIATMEIIKDLEPQPRGVYCGTIGLLLPNGRRIFNVAIRTIQLHKGQAIYGVGGGITWDSTWESEYREVHQKAAVLYRKQARFQLITTGEISQKNLLFEDQHLERLRKASRYFAFPFDAEDLGHKIEEECQDCEANRDYRLRISLSKSGEIEVNRQVLTPLSTSFCQAQVCLQEAALNQSFTYFKTTHRPHLSLGEQEKIYHNKSGELLETSIGNLVLKIAGKLYTPPIRLGILPGIYRQYLLETGQVEEKVLTLADLAQAEAIYGCNAVRGLYELQVIGL

SEQ ID NO: 5243 - protein, 1963 aa, Streptococcus pneumoniae
VFKKDRFSIRKIKGVVGSVFLGSLLMAPSVVDAATYHYVNKEIISQEAKDLIQTGKPDRNEVVYGLVYQKDQLPQTGTEASVLTAFGLLTVGSLLLIYKRKKIASVFLVGAMGLVVLPSAGAVDPVATLALASREGVVEMEGYRYVGYLSGDILKTLGLDTVLEETSAKPGEVTVVEVETPQSTTNQEQARTENQVVETEEAPKTEESPKEEPKSEIKPTDDTLPKVEEGKEDSAEPAPVEEVGGEVESKPEEKVAVKPESQPSDKPAEESKVEPPVEQAKGPEQPVQPTQAEQPRIPKDSSQPEDPKEDRGAEDTPKQEDTQPEVVETKDEAANQPVEEPKVETPAVEKQTEPKVEQVGEPVEPSEDEKAPVSPEKQPEAPEEKAVEETPKPEDKIKGIGTKEPVDKSELNNQIDKASSVSPTDYSTASYNALGPVLETAKGVYASEPVKQPEVNSETNKLKTAIDALNVDKSELQEQLRVAEQKQQADYSAKTWREFKIAELQAKEINNQTTPLPKQSEIDAATKALQDALQALAVDKTVLQNAINTANSKREEEYTAQTWKALEDALTAVNPVNEDETATQSKVDEATRNLEEAINNLVLLTEKPVLTFIETDKKALEREVVAKYSLENQNKTKIKSITATLKKGETVVSTVELIGDDVTNETITSAFKNLEYYKEYTLSTTMVYDRGDGDVTEILDNQPIQLDLKKVELKNIKRTDLIKYENGKETNESLITTVPDDKRNYYLKITSKNQKTTLLAVKNIEETTVNGTPVYKVTAIADNLVSRTADNKFEEEYVHYIEKPKVHEDNVYYNFKELVEAIQNDPSKEYRLGQSMSARNVVPNGKSYITKEFTGKLLSSEGKQFAITELEHPLFNVITNATINNVNFENVEIERSGQDNIASLANTMKGSSVITNVKITGTLSGRNNVAGFVNNMNDGTRIENVAFFGKLHSTSGNGSHTGGIAGTNYRGIVRKAYVDATITGNKTRASLLVPKVDYGLTLDHLIGTKALLTESVVKGKIDVSNPVEVGAIASKTWPVGTVSNSVSYAKIIRGEELFGSNDVDDSDYASAHIKDLYAVEGYSSGNRSFRKSKTFTKLTKEQADAKVTTFNITADKLESDLSPLAKLNEEKAYSSIQDYNAEYNQAYKNLEKLIPFYNKDYIVYQGNKLNKEHHLNTKEVLSVTAMNNNEFITNLDEANKIIVHYADGTKDYFNLSSSSEGLSNVKEYTITDLGIKYTPNIVQKDNTTLVNDIKSILESVELQSQTMYQHLNRLGDYRVNAIKDLYLEESFTDVKENLTNLITKLVQNEEHQLNDSPAARQMIRDKVEKNKAALLLGLTYLNRYYGVKFGDVNIKELMLFKPDFYGEKVSVLDRLIEIGSKENNIKGSRTFDAFGQVLAKYTKSGNLDAFLNYNRQLFTNIDNMNDWFIDATEDHVYIAERASEVEEIKNSKHRAFDNLKRSHLRNTILPLLNIDKAHLYLISNYNAIAFGSAERLGKKSLEDIKDIVNKAADGYRNYYDFWYRLASDNVKQRLLRDAVIPIWEGYNAPGGWVEKYGRYNTDKVYTPLREFFGPMDKYYNYNGTGAYAAIYPNSDDIRTDVKYVHLEMVGEYGISVYTHETTHVNDRAIYLGGFGHREGTDAEAYAQGMLQTPVTGSGFDEFGSLGINMVFKRKNDGNQWYITDPKTLKTREDINRYMKGYNDTLTLLDEIEAESVISQQNKDLNSAWFKKIDREYRDNNKLNQWDKIRNLSQEEKNELNIQSVNDLVDQQLMTNRNPGNGIYKPEAISYNDQSPYVGVRMMTGIYGGNTSKGAPGAVSFKHNAFRLWGYYGYENGFLGYASNKYKQQSKTDGESVLSDEYIIKKISNNTFNTIEEFKKAYFKEVKDKATKGLTTFEVNGSSVSSYDDLLTLFKEAVKKDAETLKQEANGNKTVSMNNTVKLKEAVYKKLLQQTDSFKTSIFK

SEQ ID NO: 5244 - protein, 77 aa, Streptococcus pneumoniae
LFNSLLSTGSLVPIPFILSSGFGVSSTAFSSGASGCFSGETGAFSSSLGSTGSPTCSTFGSVCFSTAGVSTFGSSTG

SEQ ID NO: 5245 - protein, 107 aa, Streptococcus pneumoniae
TFINWFFSTNTLYFIFWFRCFLYSLLFRSFWLLFWRDWCLFVFTWLDWFTYLFNFWFRLFFYSRRFNFWFFNRLISSLIFCFYYFWLCIFLFRCIFRSPIFFRIFWL

SEQ ID NO: 5246 - protein, 187 aa, Streptococcus pneumoniae
MNETQIQRETRQVVEDVLEKTNLKQGALFVLGLSSSEVLGGQIGKESSQEIGELIVETILGILSSRGIHLAVQGCEHVNRALVVERQVAEQFGLEIVSVHPTLHAGGSGQLAAFKFMQDPVEVEFIKAHAGLDIGDTAIGMHVKHVQVPIRPILREIGHAHVTALASRPKLIGGARAHYPQDAIRKS

SEQ ID NO: 5247 - protein, 377 aa, Streptococcus pneumoniae
NSGSLSQSTPVGAAGFAFIINENHEFVYHPQHTVYSSSSKMEAMKPYIDTGQGYTPGHKSYVSQEKIAGTDWTVLGVSSLEKLDQVRSQLLWTLLGASVTSLLVCLCLVWFSLKRWIAPLKDLRETMLEIASGAQNLRAKEVGAYELREVTRQFNAMLDQIDQLMVAIRSQEETTRQYQLQALSSQINPHFLYNTLDTIIWMAEFHDSQRVVQVTKSLATYFRLALNQGKDLICLSDEINHVRQYLFIQKQRYGDKLEYEINENVTFDNLVLPKLVLQPLVENALYHGIKEKEGQGHIKLSVQKQDSGLVIRIEDDGVGFQDAGDSSQSQLKRGGVGLQNVDQRLKLHFGANYQMKIDSRPQKGTKVEIYINRIETS

SEQ ID NO: 5248 - protein, 62 aa, Streptococcus pneumoniae
LLMQREPILVCFVWIFLHETLEAYLNQLQLGQQALPSLSMKTMNLSTILNTQFIVRLAKWRL

SEQ ID NO: 5249 - protein, 185 aa, Streptococcus pneumoniae
MKRSSLLVRMVISIFLVFLILLALVGTFYYQSSSSAIEATIEGNSQTTISQTSHFIQSYIKKLETTSTGLTQQTDVLAYAENPSQDKVEGIRDLFLTILKSDKDLKTVVLVTKSGQVISTDDSVQMKTSSDMMAEDWYQKAIHQGAMPVLTPARKSDSQWVISVTQELVDAKGANLGVLRLDISS

SEQ ID NO: 5250 - protein, 245 aa, Streptococcus pneumoniae
MTYTILIVEDEYLVRQGLTKLVNVAAYDMEIIGQAENGRQAWELIQKQVPDIILTDINMPHLNGIQLASLVRETYPQVHLVFLTGYDDFDYALSAVKLGVDDYLLKPFSRQDIEEMLGKIKQKLDKEEKEEQLQDLLTNRFEGNMAQKIQSHLADSQFSLKSLASDLGFSPTYLSSLIKKELGLPFQDYLVRERVKQAKLLLLTTDLKIYEIAEKVGFEDMNYFTQRFKQIAGVTPRQFKKGEDR

SEQ ID NO: 5251 - protein, 370 aa, Streptococcus pneumoniae
MNDKLKIFLLLGVFFLAITGFYVLLIRNAGQTDASQIEKAAVSQGGKAVKKTEISKDADLHEIYLAGGCFWGVEEYFSRVPGVTDAVSGYANGRGETTKYELINQTGHAETVHVTYDAKQISLKEILLHYFRIINPTSKNKQGNDVGTQYRTGVYYTDDKDLEVINQVFDEVAKKYDQPLAVEKENLKTFVVAEDYHQDYLKKNPNGYCHINVNQAAYPVIDASKYPKPSDEELKKTLSPEEYAVTQENQTERAFSNRYWDKFESGIYVDIATGEPLFSSKDKFESGCGWPSFTQPISPDVVTYKEDKSYNMTRMEVRSRVGDSHLGHVFTDGPQDKGGLRYCINSLSIRFIPKDQMEEKGYAYLLDYVD

SEQ ID NO: 5252 - protein, 197 aa, Streptococcus pneumoniae
LNKMERNINMKKWQTCVLGAGSLLCLTACSGKSVTSEHQTKDEMKTEQTASKTSAAKGKEVADFELMGVDGKTYRLSDYKGKKVYLKFWASWCSICLASLPDTDEIAKEAGDDYVVLTVVSPGHKGEQSEADFKNWYKGLDYKNLPVLVDPSGKLLETYGVRSYPTQAFIDKEGKLVKTHPGFMEKDAILQTLKELA

SEQ ID NO: 5253 - protein, 236 aa, Streptococcus pneumoniae
MGHIFFFLSVFLAGILSFFSPCILPLLPVYTGVLLDDKDGAQASSGKFSISVTSLLRTLAFIAGISFIFILLGYGAGFLGDLLYASWFQYLTGAIIILLGLHQMEILHFKELYKEKRLQLQGQGQNGKGYSQAFLLGLTFSFAWTPCVGPVLGSVLALAASGGSGAWQGAGLMLVYTLGLALPFLLLALTSSYVLKHFRKLHPYLGILKKVGGFLIIVMGLLVLFGNASILSQLFE

SEQ ID NO: 5254 - protein, 286 aa, Streptococcus pneumoniae
MKKWWKELIDKPLLKAFLHYYQASDSELTSVAVAYYWLISIFPLLLVVVNILPYFQIPVGEFLGFMKDVLPPSLYEGVEKIAREVLTQPSTGLLSFSVLSALWSFSKSMNFLQKAFNKAYGVEKSRGLISHQMLSLLVSFGLQILFAFALFLILFGQMILALLAHYWTKDGIIYQALQGLAGPLIYALLFAILVMLYYFLPNLSNRKISYTLPGSAFVLLVILGLLTLFSSYLNYYVHHLVDVRILGSVLLVVMMFWFILIAKIVILGAVINASMQSLKDPVFKKD

SEQ ID NO: 5255 - protein, 684 aa, Streptococcus pneumoniae
VELLIYLILFLLVLIVSSTTNKLLPFLPLPLVQILLGIVIGLFLPNTDFHLNTELFLALVIGPLLFREAEEADVTAILKHWRIIVYLIFPVIFISTLSLGGLAHLLWFSLPLAACLAVGAALGPTDLVAFASLSERFSFPKRVSNILKGEGLLNDASGLVAFQVALTAWTTGAFSLGQASSSLIFSILGGFLIGFLTAMTNRFLHTFLLSVRATDIASELLLELSLPLVTFFLAEEVHVSGIIAVVVAGILKASRFKKITLLEAQVDTVTETVWHTVTFMLNGSVFVILGMELEMIAEPILTNPIYNPLLLLLSLIALTFVLFVIRFIMIYGYYAYRTRRLKKKLNKYMKDMFLLTFSGVKGTVSIATILLIPSNLEQEYPLLLFLVAGVTLVSFLTGLLVLPHLSDEEEESKDYLMHIAILNEVTLELEKELEDTRNKLPLYAAIDNYHGRIENLILSQENQDDQEDWAALKLLILSIESDGLEQAYEEGNISNRVYRVYQRYLKNIEQGINRKLASRLTYYFLVSLRILRFLLHEVFTLGKTFRSWKNKEQSRLRALDYDQIAELYLANTEMIIESLENLKGVYSRSLISFMQESRLRETTIISSGAFVERVINRVKPNNINEMLRGYYLERKLIFEYEEKRLITTKYAKKLRQNVNNLENYSLKEAANTLPYDMVELVRRN

SEQ ID NO: 5256 - protein, 63 aa, Streptococcus pneumoniae
LLLKWNGAREKLSTKTVPRLTKKSKSRRRYLNPVVKKIKEDVRGITDLPHPIFTGFDCLKYNQ

SEQ ID NO: 5257 - protein, 84 aa, Streptococcus pneumoniae
MDKQYLHEKLDAMRQNFVESTHHERAVGVLDQAHMSKKMLKIKKKLVALEMERCQRKIEHKDCSKIDQKIKEQKEIFESCCKKD

SEQ ID NO: 5258 - protein, 62 aa, Streptococcus pneumoniae
AFFCSYALGLARPPLVRGGLIQQNSGAWHPAFRVGIVYPCLYLSNFSIITKNGGLLTWFKVR

SEQ ID NO: 5259 - protein, 187 aa, Streptococcus pneumoniae
LKMKRPLEMAHDFLAEVVTKEDVVVDATMGNGHDTLFLAKLAKQVYAFDIQKQALEKTQERLHQADLTNAQLILQGHETLDQFVIKAKAGIFNLGYLPSADKSVITRPQTTIEALEKLCGLLVKGGRIAIMIYYGHEGGDLERDAVLDFVIQLNQQEYTAAIYRTLNQVNNPPFLVMIEKLERYRHG

SEQ ID NO: 5260 - protein, 148 aa, Streptococcus pneumoniae
VETVKRLRKYPKIEIVSHLINGLPGETHEMMVENVRRCVTNNDIQGIKLHLLHLMTNTRMQRDYHEGRLQLMSQDEYVRVICDQLEIIPKHIVIHRITGDAPRDMLLGPMWSLNKWEALNSIEMEMRRRGSVQGCKAVKQEFENEKTT

SEQ ID NO: 5261 - protein, 83 aa, Streptococcus pneumoniae
FYKEIDFIHRKWPDVQKYLVYFQNFTNTREKVEVIRERYEQAINEPGVVGINIGTRPDCLPDETIEYLAELSECMHVTVELGL

SEQ ID NO: 5262 - protein, 145 aa, Streptococcus pneumoniae
YSNTKTGKAKSAKFRPSFFNLKSLVRIMQTTKVSINNKIDANFIKIIPILYHKKRLMETRNRGIYRKVRLLRLWVIFVIMKVIKSYNTLNDYYRKLFGEKTFKVPIDAGFDCPNRDGTVAHGGCTFCTVSGSGDAIVAPDAPIRE

SEQ ID NO: 5263 - protein, 119 aa, Streptococcus pneumoniae
MGMILMKLASILLLILTLVVCIILTKLFRLKKLGRNFADLAFPVLVFEYYLITAKTFTHNFLPRLGLALSFLAIILVFFFLLKKRSFYYPKFIKFFWRAGFLLTLIMYIEMIVELFLMK

SEQ ID NO: 5264 - protein, 81 aa, Streptococcus pneumoniae
MHIHYNTNQTTLPLEISSFLPQDHLVFTIEKVVNTLEDCHFHAFYHAFDRPSYHPKMLVSTLLFAYSQGIFSGRKIEKWKS

SEQ ID NO: 5265 - protein, 207 aa, Streptococcus pneumoniae
MEELVTLDCLFIDGTKIEANANKYSFVWKKTTEKFSAKLQEQIQVYFQEEITPLLIKYAMFDKEQKRGYKQSARNLANWHYNDKEDSYTHPDGWCYRFHHTKYQKTQTDFQQEIKVYYADEPESAPQKGLYMNERYQNLKAKECQALLSPQGRQIFAQRKIDVEPVFGQIKASLGYKRCNLRGKCQVRIDMGLVLMANNLLKYSEMK

SEQ ID NO: 5266 - protein, 2172 aa, Streptococcus pneumoniae
MIVEEKADKALETKNVVERTEQSEPSSTEAIASEKKEDEAVTPKEEKVSAKPEEKAPRIESQASSQEKPLKEDAKAVTNEEVNQMIEDRKVDFNQNWYFKLNANSKEAIKPDADVSTWKKLDLPYDWSIFNDFDHESPAQNEGGQLNGGEAWYRKTFKLDEKDLKKNVRLTFDGVYMDSQVYVNGQLVGHYPNGYNQFSYDITKYLHKDGRENVIAVHAVNKQPSSRWYSGSGIYRDVTLQVTDKVHVEKNGTTILTPKLEEQQHGKVETHVTSKIVNTDDKDHELVAEYQIVERGGHAVTGLVRTASRTLKAHESTSLDAILEVERPKLWTVLNDKPALYELITRVYRDGQLVDAKKDLFGYRYYHWTPNEGFSLNGERIKFHGVSLHHDHGALGAEENYKAEYRRLKQMKEMGVNSIRTTHNPASEQTLQIAAELGLLVQEEAFDTWYGGKKPYDYGRFFEKDATHPEARKGEKWSDFDLRTMVERGKNNPAIFMWSIGNEIGEANGDAHSLATVKRLVKVIKDVDKTRYVTMGADKFRFGNGSGGHEKIADELDAVGFNYSEDNYKALRAKHPKWLIYGSETSSATRTRGSYYRPERELKHSNGPERNYEQSDYGNDRVGWGKTATASWTFDRDNAGYAGQFIWTGTDYIGEPTPWHNQNQTPVKSSYFGIVDTAGIPKHDFYLYQSQWVSVKKKPMVHLLPHWNWENKELASKVADSEGKIPVRAYSNASSVELFLNGKSLGLKTFNKKQTSDGRTYQEGANANELYLEWKVAYQPGTLEAIARDESGKEIARDKITTAGKPAAVRLIKEDHAIAADGKDLTYIYYEIVDSHGNVVPTANNLVRFQLHGQGQLVGVDNGEQASRERYKAQADGSWIRKAFNGKGVAIVKSTEQAGKFTLTAHSDLLKSNQVTVFTGKKEGQEKTVLGTEVPKVQTIIGEAPEMPTTVPFVYSDGSRAERPVTWSSVDVSKPGIVTVKGMADGREVEARVEVIALKSELPVVKRIAPNTDLNSVDKSVSYVLTDGSVEEYEVDKWEIAEEDKAKLAIPGSRIQATGYLEGQPIHATLVVEEGNPAAPAVPTVTVGGEAVTGLTSQKPMQYRTLAYGAKLPEVTASAKNAAVTVLQASAANGMRASIFIQPKDGGPLQTYAIQFLEEAPKIAHLSLQVEKADSLKEDQTVKLSVRAHYQDGTQAVLPADKVTFSTSGEGEVAIRKGMLELHKPGAVTLNAEYEGAKGQVELTIQANTEKKIAQSIRPVNVVTDLHQEPSLPATVTVEYDKGFPKTHKVTWQAIPKEKLDSYQTFEVLGKVEGIDLEARAKVSVEGIVSVEEVSVTTPIAEAPQLPESVRTYDSNGHVSSAKVAWDAIRPEQYAKEGVFTVNGRLEGTQLTTKLHVRVSAQTEQGANISDQWTGSELPLAFASDSNPSDPVSNVNDKLISYNNQPANRWTNWNRSNPEASVGVLFGDSGILSKRSVDNLSVGFHEDHGVGAPKSYVIEYYVGKTVPTAPKNPSFVGNEDHVFNDSANWKPVTNLKAPAQLKAGEMNHFSFDKVETYAVRIRMVRADNKLGTSITEVQIFAKQVAAAKQGQTRIQVDGKDLANFNPDLTDYYLESVDGKVPAVTASVSNNGLATVVPSVREGEPVRVIAKAENGDILGEYRLHFTKDKNLLSHKPVAAVKQARLLQVGQALELPTKVPVYFTGKDGYETKDLSVEWEEVPAENLTKAGQFTVRGHVLGSDLVAEVTVRVTDKLGEALSDNPNYDENSNQAFASATNDIDKNSHDRVDYLNDGDHSENRRWTNWSPTPSSNPEVSAGVIFRENGKIVERTVAQAKLHFFADSGTDAPTKLVLERYVGPEFEVPTYYSNYQAYDADHPFNNPENWEAVPYRADKDIAAGDEINVTFKAVKAKAMRWRMERKADKSGVAMIEMTFLAPSELPQESTQSKILVDGKELADFAENRQDYQITYKGQRPKVSVEENNQVASTVVDSGEDSLPVLVRLVSESGKQVKEYRIHLTKEKPVSEKTVAAVQEDLPKLEFVEKDLAYKTVEKKDSTLYLGETRVEQEGKTGKERIFTAINPDGSKEEKLREVVEAPTDRIVLVGTKPVAQEAKKPQVSEKADTKPIDSSEASQTNKAQLPNTGSAASQAAVAAGLALLGLSAGLVVTKGKKED

SEQ ID NO: 5267 - protein, 61 aa, Streptococcus pneumoniae
LNWIFAECKLLKLGCHTMYTTWALVVANCTKYNIRRVLWGKAIGIGKEFIAFVSLLWELAQ

SEQ ID NO: 5268 - protein, 63 aa, Streptococcus pneumoniae
MKIKEQTRKLAAGCSKHSFEVVDKTDEVSSKHGFEVVDETDEVSNHIYGKATLTKFELDFRRV

SEQ ID NO: 5269 - protein, 143 aa, Streptococcus pneumoniae
LLTSSVSSTTSKPCFELTSSVLSTTSKLCFEQPAASFLVCSLIFIEFIFYRSALFCFCCVLFVTFDHLFSVPSKDTDIEYKEGYCTKDCFDITSCSVTNCPTKKFFDWSFKSRVSNQLSLAHTFWEGTYTFSKFCCKWCNKCT

SEQ ID NO: 5270 - protein, 261 aa, Streptococcus pneumoniae
LNKKIGFWGSKFFIGFILGIVIGIMGTPHPIAGVADADKWRLVIKGWLSLGLTAGVSLELFSLIGSWFIAAVEPLSQGITNVATKRLQGRKFNIGLDWPFIAGRAEIWACANVLAPIMLIEAVLLSKVGNGILPLAGIIAMGVTPALLVVTRGKLLRMIIFGTLLLPLFLLSGTLIAPFATELAKGVGAFPEGVSQTQLITHSTLEGPIEKLLGWTIGNTTTGDIKAILGAVAFLVFYIGIFAWYRKQMIKRNEEYAAKAK

SEQ ID NO: 5271 - protein, 230 aa, Streptococcus pneumoniae
MDAIFDLIGKVFNPILEMGGPVIMLIILTVLALLFGVKFSKALEGGIKLAIALTGIGAIIGMLNGAFSASLAKFVENTGIQLSITDVGWAPLATITWGSAWTLYFLLIMLIVNVVMLAMKKTDTLDVDIFDIWHLSITGLLIKWYADNNGVSQGVSLFIATAAIVLVGVLKIINSDLMKPTFDDLLNAPSSSPMTSTHMNYMMNPVIMVLDKIFEKSSQALIDMTLMLLN

SEQ ID NO: 5272 - protein, 101 aa, Streptococcus pneumoniae
MIKILAACGAGVNSSHQIKSALEEELSNRGYDVHCDAVMVKDVNEDLMKGYDIFTPIAATDLGFEPGIPVIEAGPILFRIPAMSAPVFDNIEAAIKEHGLS

SEQ ID NO: 5273 - protein, 158 aa, Streptococcus pneumoniae
MVLDYFFDKNLVFCLEADNQEQLFDQVATLLEEREIVTPTYREALITREKSFPTGLDMEFLGKDLPNVAIPHTDIVHNLAEKVVVVRLEKPVTFHNMIAPDKEVEVSLLFFIINNSSSSQTNILAQLMDFFTGNGHLEDLSKISEPEKLYAYIAEATA

SEQ ID NO: 5274 - protein, 2138 aa, Streptococcus pneumoniae
MKKSTVLSLTTAAVILAAYAPNEVVLADTSSSEDALSISDKEKVVVDKETENKEKHKDIHSAMETSQDFKEKKIAVIKEKEVVSKTPVIDTKTSNEENSNKSQGDHTDSFVNKNTENPKKEDKVVYIAEFKDKESGEKAIKELSSLKNTKVLYTYDRIFNGSAIETIPDNLDKIKQIEGISSVERAQKVQPMMNHARKEIGVEEAIDYLKSINAPFGKNFDGRGMVISNIDTGTDYRHKAMRIDDDAKASMRFKKEDLKGTDKNFWLSDKIPHAFNYYNGGKITVEKYDDGRDYFDPHGMHIAGILAGNDTEQDIKNFNGIDGIAPNAQIFSYKMYSDAGSGFAGDETMFHAIEDSIKHNVDVVSVSSGFTGTGLVGEKYWQAIRALRKAGIPMVVATGNYATSASSSSWDLVANNHLKMTDTGNVTRTAAHEDAIAVASAKNQTVEFDKVNIGGQSFKYRNIGAFFDKNKITTNEDGTKAPSKLKFVYIGKGQDQDLIGLDLRGKIAVMDRIYTKDLKNAFKKAMDKGARAIMVVNTVNYYNRDNWTELPAMGYEADEGTKSQVFSISGDDGVKLWNMINPDKKTEVKRNNKEDFKDKLEQYYPIDMESFNSNKPNVGDEKEIDFKFAPDTDKELYKEDIIVPAGSTSWGPRIDLLLKPDVSAPGKNIKSTLNVINGKSTYGYMSGTSMATPIVAASTVLIRPKLKEMLEKPVLKNLKGDDKIDLTSLTKIALQNTARPMMDATSWKEKSQYFASPRQQGAGLINVANALRNEVVATFKNTDSKGLVNSYGSISLKEIKGDKKYFTIKLHNTSNRPLTFKVSASAVTTDSLTDRLKLDETYKDEKSPDGKQIVPEIHPEKVKGANITFEHDTFTIGANSSFDLNAVINVGEAKNKNKFVESFIHFESVEEMEALSSNGKKTDFQPSLSMPLMGFAGNWNHEPILDKWAWEEGSKSKTMEGYDDDGKPKIPGTLNKGIGGEHGIDKFNPAGVIQNRKDKNRTSLDQDPDLFAFNNQGVHAESTSGSKIANIYPLDSNGNPQDAQLERGLTPSPLVLRSAEEGLISIVNTNKEGENQKDLKVVSREHFIRGILNSKGNDAKGIKSSKLKVWGDLKWDGLIYNPRGREENAPESKDNQDPATKIRGQFEPIAEGQYFYKFKYRLTKDYPWQVSYIPVKIDNTAPKIVSVDFSNPEKIKLITKDTYHKVKDQYKNETLFARDQKEHPEKFDEIANEVWYAGAALVNEDGEVEKNLEVTYAGEGQGRNRKLDKDGNTIYEISGAGDLRGKIIEVIALDGASNFTKIHRIKFANQADEKGMISYYLVDPDQDSSKYQKLGEIPESKFKNLKNVKDDSLNKETAEVENNLLVDNQSIEGKSLFNIHKTISTIRDFENKDLKKLIKKKYKQEDDFVNGGTRTVERDYKYDDKGNIIAYDDGTDLEYETEKLDEIKSKIYGVLSPSKDGHFEILGKISNVSKNAKVYYGNNYKSIEIKATKYDFHSKTMTFDLYANINDIVDGLAFAGDMRLFVKDNDQKKAEIKIRMPEKIKETKSEYPYVSSYGNVIELGEGDLSKNKPDNLTKMESGKIYSDSEKQQYLLKDNIILRKGYALKVTTYNPGKTDMLEGNGVYSKEDIAKIQKANPNLRALSETTIYADSRNVEDGRSTQAVLMSALDGFNIIRYQVFTFKMNDKGEAIDKDGNLVTDSSKLVLFGKDDKEYTGEDKSNVEAIKEDGSMLFIDTKPVNLSMDKNYFNPSKSNKIYVRNPEFYLRGKISDKGGFNWELRVNESVVDNYLIYGDLHIDNTRDFNIKLNVKDGDIMDWGMKDYKANGFPDKVTDMDGNVYLQTGYSNLNAKAVGVHYQFLYDNVKPEVNIDPKGNTSIEYADGKSVVFNINDKRNNGFDGEIQEQHIYINGKEYTSFNDIKQIIDKTLNIKIVVKDFARNTTVKEFILNKDTGEVSELKPHRVTVTIQNGKEMSSTIVSEEDFILPVYKGELEKGYQFDGWEISGFEGKKDAGYVINLSKDTFIKPVFKKIEEKKEEENKPTFDVSKKKDNPQVNHSQLNESHRKEDLQREDHSQKSDSTKDVTATVLDKNNISSKSTTNNPNKLPKTGTASGAQTLLAAGIMFIVGIFLGLKKKNQD

SEQ ID NO: 5275 - protein, 67 aa, Streptococcus pneumoniae
WYECAYNVSRLTKVLDLYSSKISSNHVNVALPCVWLLTTSVLSTTSKQCFEQSAASFLVCSLIFIEY

SEQ ID NO: 5276 - protein, 65 aa, Streptococcus pneumoniae
LLATLESEARKKVGYLQVKTVAEGSNKDYDRTNDFYRGLGFKKLEIFLQLWNPQNPCQILIKKLE

SEQ ID NO: 5277 - protein, 261 aa, Streptococcus pneumoniae
MKKYQRMHLIFIRQYIKQIMEYKVDFVVGVLGVFLAQGLNLLFLNVIFQHIPFLEGWTFQEIAFIYGFSLIPKGMDHLFFDNLWALGQRLVRKGEFDKYLTRPINPLFHILVETFQIDALGELLVGGILLGTTVTSIVWTLPKFLLFLVCIPFATLIYTSLKIATASIAFWTKQSGAMIYIFYMFNDFAKYPISIYNSLLRWLISFIVPFAFTAYYPASYFLQEKDVFFNVGGLMLISLVFFVISLKLWDKGLDSYESAGS

SEQ ID NO: 5278 - protein, 286 aa, Streptococcus pneumoniae
LRILSVASTERSSRMIKLWRRYKPFINAGVQELITYRVNFILYRIGDVMGAFVAFYLWKAVFDSSQESLIQGFSMADITLYIIMSFVTNLLTRSDSSFMIGEEVKDGSIIMRLLRPVHFAASYLFTELGSKWLIFISVGLPFLSVIVLMKIISGQGIVEVLGLTVLYLFSLTLAYLINFFFNICFGFSAFVFKNLWGSNLLKTSIVAFMSGSLIPLAFFPKVVSDILSFLPFSSLIYTPVMIIVGKYDASQILQALLLQFFWLLVMVGLSQLIWKRVQSFITIQGG

SEQ ID NO: 5279 - protein, 317 aa, Streptococcus pneumoniae
VKIVKEPGLKGALRSFIHPEKQTFEAVKDLTFEVPKGQILGFIGANGAGKSTTIKMLTGILKPTSGFCRINGKIPQDNRQDYVKDIGVVFGQRTQLWWDLALQETYTVLKEIYDVPNSLFHKRMDFLNEVLDLKDFIKDPVRTLSLGQRMRADIAASLLHNPKVLFLDEPTIGLDVSVKDNIRRAITQINQEEETTILLTTHDLSDIEQLCDRIFMIDKGQEIFDGTVSQLKETFGKMKTLSFELLPGQSHLVSHYEGLSDMTIDRQGNSLNIEFDSSRYQSADIIKQTLSDFEIRDLKMVDTDIEDIIRRFYRKEL

SEQ ID NO: 5280 - protein, 82 aa, Streptococcus pneumoniae
ITNLLIFSPEGGINFDHKIGYSLYPENMLRMIVSKQYLLFYLIHEKEVHTLRIINSRTDYLNQLDHLFRTCRKLFSSQIISL

SEQ ID NO: 5281 - protein, 131 aa, Streptococcus pneumoniae
YETIAKTFIEINFTFPIDLFSSYFNPLYIMVSNLHQNDKINQLISDYKQNMKAFYITIEKFIRDDESLKCYFTKVISSRSKVTSLDQIEADKTIQRKYSSELKKFIGFYNEIICEENSFLHVRKRWSSWFR

SEQ ID NO: 5282 - protein, 157 aa, Streptococcus pneumoniae
VRMVHTTSDLSTTSKQCFEQPEASFLVCSLVFIEYNTLLEVGLNSLISLFTFTFDILYPIVKVGHTDDYSHGAVKLSVSLVDKDVMKKISVTVIGYFEINIDENITDILYVNGTAILYPYLRSIVSIVSAIDSSEAMLLPTINVLELLDKSQPFEEE

SEQ ID NO: 5283 - protein, 229 aa, Streptococcus pneumoniae
MAKKSKQLRAALEKIDSTKAYSVEEAVALAKETNFAKFDATVEVAYNLNIDVKKADQQIRGAMVLPNGTGKTSRVLVFARGAKAEEAKAAGADFVGEDDLVAKINDGWLDFDVVIATPDMMALVGRLGRVLGPRNLMPNPKTGTVTMDVAKAVEESKGGKITYRADRAGNVQAIIGKVSFEAEKLVENFKAFNETIQKAKPATAKGTYVTNLTITTTQGVGIKVDVNSL

SEQ ID NO: 5284 - protein, 141 aa, Streptococcus pneumoniae
MAKKVEKLVKLQIPAGKATPAPPVGPALGQAGINIMGFTKEFNARTADQAGMIIPVVISVYEDKSFTFITKTPPAAVLLKKAAGVEKGSGTPNKTKVATVTRAQVQEIAETKMPDLNAANVESAMRMIEGTARSMGFTVVD

SEQ ID NO: 5285 - protein, 74 aa, Streptococcus pneumoniae
NCKRKVYFLYSMKINEQTRKLAAGYSKYSFEVANKTDEVSSKHCFEIVDRTDEVSNHTHGKATLTWFEEIFEEY

SEQ ID NO: 5286 - protein, 238 aa, Streptococcus pneumoniae
MKKRYLVLTALLALSLAACSQEKAKNEDGEAKTEQTAKADGTVGSKSQGAAQKKAEVVNKGDYYSIQGKYDEIIVANKHYPLSKDYNPGENPTAKAELVKLIKAMQEAGFPISDHYSGFRSYETQTKLYQDYVNQDGKAAADRYSARPGYSEHQTGLAFDVIGTDGDLVTEEKAAQWLLDHAADYGFVVRYLKGKEKETGYMAEEWHLRYVGKEAKEIAESGLSLEEYYGFEGGDYVD

SEQ ID NO: 5287 - protein, 60 aa, Streptococcus pneumoniae
QSCQDKVSFFHFYSFISNSLSTSDDKHSTNLLISSGFTWQVSAVISSKGTHQTGPRPLRP

SEQ ID NO: 5288 - protein, 169 aa, Streptococcus pneumoniae
LLMLILRARRYHRMCLICQRIELIKAGQNPYFVKELETGYLVIGDHQYFAGYSLFLAKEHVTELHHLKKETRLRFLEEMSLVQEAVAKAFAAEKMNIELLGNGDAHLHWHLFPRRRGDMNGHGLKGRGPVWWVPFEEMTAETCQVKPEEIKRLVECLSSEVDKLLEIKE

SEQ ID NO: 5289 - protein, 71 aa, Streptococcus pneumoniae
LAKEQDIPFKLDIYPFYGSDASAAMSAGAEVKHALLGAGIESSHSYERTHIDSVVATERIVDAYLKSEAVS

SEQ ID NO: 5290 - protein, 198 aa, Streptococcus pneumoniae
MNQTVEYIKELTAIASPTGFTREISNYLVKTLEGFGYQPVRTAKGGVNVTIKGQNDEQHRYVTAHVDTLGAIVRAVKPDGRLKLDRIGGFPWNMIEGENCTVHVASTGQKVSGTILIHQTSCHVYKDAGTAERTQDNMEVRLDVKVSNEKETRALGIEVGDFISFDPRTVVTDTGFIKSRHLDDKVSAAILLNLLRIY

SEQ ID NO: 5291 - protein, 113 aa, Streptococcus pneumoniae
LDIANLGLDAIIKYSIPVLVILYPITIAIVMIVIVNKFVALSKPGMQLPIAVVTVIAIASVQGSSFKVEFLANLVSVLPFAKASLPWLVPAIVGILLSLVLPNKQESDVFEME

SEQ ID NO: 5292 - protein, 446 aa, Streptococcus pneumoniae
MKEIFMAKKGTLTGLLLFGIFFGAGNLIFPPSLGALSGEHFLPAIAGFVFSGVGIAVLTLIIGTLNPKGYIYEISTKIAPWFATLYLSVLYLSIGPFFATPRTATTAYEVGISPLLSDANKGLGLIVFTVLYFAAAYLISLNPSKILDRIGRILTPVFAILIVILVVLGAIKYGGTSPQTASAAYQASAFGTGFLEGYNTLDALASVAFSVIAVQTLKQLGFSSKKKYISTIWVVGIVVALAFSALYIGLGFLGNHFPVPAEAMKGGTPGVYILSQATQEIFGSTAQLFLAAMVTVTCFTTTVGLIVSTAEFFNERFAQISYKVYATAFTLIGLDIANLGLDAIIKYSIPVLVILYPITIAIVMIVIVNKFVALSKPGMQLPIAVVTVIAIASVQGSSFKVEFLANLVSVLPFAKASLPWLVPAIVGILLSLVLPNKQESDVFEME

SEQ ID NO: 5293 - protein, 62 aa, Streptococcus pneumoniae
LKRFSKSIRRKRMKEIAFDAFYQLYQNDQLSLVDVREVDEFAALHLEGAHNLPLSQLADSYD

SEQ ID NO: 5294 - protein, 79 aa, Streptococcus pneumoniae
LFLLILFENLFKPRQRRLTVRMLPTSSVLSATSKLYFEQPTTSFLVCSLIFIDYKMVLILFFKSGTTSASNQGFLAIQI

SEQ ID NO: 5295 - protein, 192 aa, Streptococcus pneumoniae
MSQIERIKQAIMADSQNASYTERGIEPLFAAPKTARINIIGQAPGLKTQEAGLYWKDKSGDRLRDWLGVDEDTFYNSGYFAVLPMDFYFPGHGKSGDLPPRTGFAEKWHPQVLQELPDIQLTLLIGQYAQAYYLQEKISGKVTERVKHYKDYLPAYFPLVHPSPRNQIWMAKNPWFEAEVVPDLKKRIKTIL

SEQ ID NO: 5296 - protein, 466 aa, Streptococcus pneumoniae
MTAIDFTAEVEKRKEDLLADLFSLLEINSERDDSKADAQHPFGPGPVKALEKFLEIADRDGYPTKNVDNYAGHFEFGDGEEVLGIFAHMDVVPAGSGWDTDPYTPTIKDGRLYARGASDDKGPTTACYYGLKIIKELGLPTSKKVRFIVGTDEESGWADMDYYFEHVGLAKPDFGFSPDAEFPIINGEKGNITEYLHFAGENTGVARLHSFTGGLRENMVPESATAVVSGDLADLQAKLDAFVAEHKLRGELQEEAGKYKVTIIGKSAHGAMPASGVNGATYLALFLSQFGFAGPAKDYLDIAGKILLNDHEGENLKIAHVDEKMGALSMNAGVFHFDETSADNTIALNIRYPKGTSPEQIKSILENLPVVSVSLSEHGHTPHYVPMEDPLVQTLLNIYEKQTGFKGHEQVIGGGTFGRLLERGVAYGAMFPDSIDTMHQANEFIALDDLFRAAAIYAEAIYELIK

SEQ ID NO: 5297 - protein, 201 aa, Streptococcus pneumoniae
MKFLELNKKRHATKHFTDKPVDPKDVRTAIEIATLAPSAHNSQPWKFVVVREKNAELAKLAYGSNFEQVSSAPVTIALFTDTDLAKRARKIARVGGANNFSEEQLQYFMKNLPAEFARYSEQQVSDYLALNAGLVAMNLVLALTDQGIGSNIILGFDKSKVNEVLEIKDRFRPELLITVGYTDEKLEPSYRLPVDEIIEKR

SEQ ID NO: 5298 - protein, 79 aa, Streptococcus pneumoniae
FSQATKNGRIASNRLNFFILSPFKCKVLASLSETFLINQYISFMSVIEKLNHEKSLQALSNYGRMEAVELEKEIDYEIS

SEQ ID NO: 5299 - protein, 266 aa, Streptococcus pneumoniae
MKKFSLLLAILPFLVACENQATPKETSAQKTIVLATAGDVPPFDYEDKGNLTGFDIEVLKAVDEKLSDYEIQFQRTAWESIFPGLDSGHYQAAADNLSYTKERAEKYLYSLPISNNPLVLVSNKKNPLTSLDQIAGKTTQEDTGTSNAQFINNWNQKHTDNPATINFSGEDIGKRILDLANGEFDFLVFDKVSVQKIIKDRGLDLSVVDLPSADSPSNYIIFSSDQKEFKEQFDKALKELYQDGTLEKLSNTYLGGSYLPDQSQLQ

SEQ ID NO: 5300 - protein, 277 aa, Streptococcus pneumoniae
MNHKIAILSDVHGNATALEAVIADAKNQGASEYWLLGDIFLPGPGANDLVALLKDLPITASVRGNWDDRVLEVLDGEYGLEYPKEIQSMRMTQFLMERMDPATIVWLRSLPLLEKKEIDGLRFSISHNLPDKNYGGDLLVENDTEKFDQLLDAETDVAVYGHVHKQLLRYGSQGQQIINPGSIGMPYFNWEALKNHRAQYAVIEVEDGELVNILFRKVAYDYEAELEFAKSKRLPFIEMYEELRREDNYQRHNLELLASLIEKHRYVEDVKNFFDFL

SEQ ID NO: 5301 - protein, 614 aa, Streptococcus pneumoniae
MNNLIKSKLELLPTSPGCYIHKDKNGTIIYVGKAKNLRNRVRSYFRGSHNTKTEALVSEIVDFEFIVTESNIEALLLEINLIKENKPKYNIMLKDDKSYPFIKITNERYPRLIITRQVKKDGGLYFGPYPDVGAANEIKRLLDRIFPFRKCTNPPSKVCFYYHIGQCMAHTICKKDEAYFKSMAQEVSDFLKGQDDKIIDDLKSKMAVAAQSMEFERAAEYRDLIQAIGTLRTKQRVMAKDLQNRDVFGYYVDKGWMCVQVFFVRQGKLIERDVNLFPYFNDPDEDFLTYVGQFYQEKSHLVPNEVLIPQDIDEEAVKALVDSKILKPQRGEKKQLVNLAIKNARVSLEQKFNLLEKSVEKTQGAIENLGRLLQIPTPVRIESFDNSNIMGTSPVSAMVVFVNGKPSKKDYRKYKIKTVVGPDDYASMREVIRRRYGRVQREALTPPDLIVIDGGQGQVNIAKQVIQEELGLDIPIAGLQKNDKHQTHELLFGDPLEVVDLSRNSQEFFLLQRIQDEVHRFAITFHRQLRSKNSFSSQLDGIDGLGPKRKQNLMKHFKSLTKIKEASVDEIVEVGVPRVVAEAVQRKLNPQGEALPQVAEERVDYQTEGNHNEP

SEQ ID NO: 5302 - protein, 240 aa, Streptococcus pneumoniae
LLERWRDMRWLFRLIGAFFSFVWRLFWRLVWIVVLLCVLAFGLLWYLNGDFQGALKQAERSVKIGQQSIDQWEKTGQLPKLSQTDSHQHSEGRWPQASARIYLDPQMDSRFQEAYLEAIQNWNQTGAFNFELVTESSKADITATEMNDGGTPVAGEAESQTNLLTGQFLSVTVRLNHYYLSNPYYGYSYERLVHTAEHELGHAIGLDHTDEKSVMQPAGSFYGIQEEDVANLRKIYETSE

SEQ ID NO: 5303 - protein, 410 aa, Streptococcus pneumoniae
MALTTLTKEEFQTYSDQVSSRSFMQSVQMGDLLEKRGARIVYLALKQEGEIQVAALVYSLPMLGGLHMELNSGPIYTQQDALPVFYAELKEYAKQNGVLELLVKPYETYQTFDSQGNPIDAEKKSIIQGLTDLGYQFDGLTTGYPGGEPDWLYYKDLTELTEKSLLKSFSKKGKPLVKKAETFGIRLKKLKREELSIFKNITKETSERREYSDKSLEYYEHFYDTFGEQAEFLIASLNFSEYMSKLQGEQSKLEEKLDKLRLDLSKNPHSEKKQNQLREYSSQFETFEVRKAEARDLIEKYGEEDIVLAGSLFVYMPQETTYLFSGSYTEFNKFYAPALLQKYVMLESIKRGIPKYNFLGIQGIFDGSDGVLRFKQNFNGYIVRKAGTFRYHPSPLKYKAIQLLKKIVGR

SEQ ID NO: 5304 - protein, 406 aa, Streptococcus pneumoniae
MYRYQIGIPTLEYDQFVKEHELANVLQSSAWEEVKSNWQHEKFGVYREEKLLATASILIRTLPLGYKMFYIPRGPILDYGDKELLNFAIQSIKSYARSKRAVFVTFDPSICLSQSLINQEKTEFPENLAIIDSLQQMGVRWSGKTEEMGDTIQPRIQAKIYKENFEEDKLSKSTKQAIRTARNKGLEIQYGGLELLDSFSELMKKTEKRKEIHLRNEAYYKKLLDNFKDKAYITLATLDVSKRSQELEEQLAKNRALEETFTESTRTSKVEAQKKEKERLLEELTFLQEYIDVGQARVPLAATLSLEFGTTSVNIYAGMDDDFKRYNAPILTWYETARYAFERGMVWQNLGGVENSLNGGLYHFKEKFNPTIEEYLGEFTMPTHPLYPLLRLALDFRKTLRKKHRK

SEQ ID NO: 5305 - protein, 259 aa, Streptococcus pneumoniae
MPVMKIEYYSQVLDMEWGMNVLYPDANRVREPECEDIPVLYLLHGMSGNHNSWLKRTNVERLLRGTNLIVVMPNTSNGWYTDTQYGFDYYTALAEELPQVLKRFFPNMTSKREKTFIAGLSMGGYGCFKLALATNRFSHAASFSGALSFQNFSPESQNLGSPAYWRGVFGEIRDWTTSPYSLESLAKKSDKKTKLWAWCGEQDFLYEANNLAVKNLKKLGFDVTYSHSAGTHEWYYWEKQLEVFLTTLPIDFKLEERLT

SEQ ID NO: 5306 - protein, 553 aa, Streptococcus pneumoniae
MSNISLTTLGGVRENGKNMYIAEIGESIFVLNVGLKYPENEQLGVDVVIPNMDYLFENSDRIAGVFLTHGHADAIGALPYLLAEAKVPVFGSELTIELAKLFVKGNDAVKKFNDFHVIDENTEIDFGGTVVSFFPTTYSVPESLGIVLKTSEGSIVYTGDFKFDQTASESYATDFARLAEIGRDGVLALLSDSANADSNIQVASESEVRDEITQTIADWEGRIIVAAVSSNLSRIQQIFDAADKTGRRIVLTGFDIENIVRTAIRLKKLSLANEILLIKPKDMSRFEDHELIILETGRMGEPINGLRKMSIGRHRYVEIKDGDLVYIATAPSIAKEAFVARVENMIYQAGGVVKLITQSLHVSGHGNVRDLQLMINLLQPKYLFPVQGEYRELDAHAKAAMAVGMLPERIFIPKKGTTMAYENGDFVPAGSVSAGDILIDGNAIGDVGNVVLRDRKVLSEDGIFIVAITVNRREKKIVARARVHTRGFVYLKKSRDILRESSELINQTVEDYLQGDDFDWADLKGKVRDNLTKYLFDQTKRRPAILPVVMEAK

SEQ ID NO: 5307 - protein, 646 aa, Streptococcus pneumoniae
MTSASIVKESLEQLGAECRVYLPNRFTDGYGPNASVYKYFIEQDRISLIVTVDNGVAGHEAIALAQSMGVDVIVTDHHSMPETLPDAYAIVHPEHPDADYPFKYLAGCGVAFKLACALLEEVQVELLDLVAIGTIADMVSLTDENRILVQYGLEMLGHTQRIGLQEMLDMAGIAANEVTEETVGFQIAPRLNALGRLDDPNPAIDLLTGFDDEEAHEIALMIHQKNEERKEIVQSIYEEAKTMVDPEKKVQVLAKEGWNPGVLGIVAGRLLEELGQTVIVLNIKDGRAKGSARIVEPVDIFEALDPHRDLFIAFGGHAGAAGMTLEVEQLSDLSQVLEDYVREKGADAGGKNKLNLDEELDLEALSLETVKSFERLAPFGMDNQKPIFYIKNFQVESARTMGAGNAHLKLKISKGEASFEVVAFGQGRWATEFSQTKNLELAVKLSVNQWNGQTALQLMMVDARVEGVQLFNIRGKNAVLPEGVPVLDFPGELPNLAASEAIVVKNIPEDITQLKTIFQEQHFSAVYFKNDIDKAYYLTGYGTRDQFAKLYKTIYQFPEFDIRYKLKDLAAYLNIQQILLVKMIQVFEELGFVTIKDGVMTVNKEAPKREIGESQIYQNLKQTVKDQEMMALGTVQEIYDFLMEKE

SEQ ID NO: 5308 - protein, 740 aa, Streptococcus pneumoniae
LITPTYEWQFALQVEDADFTKIAKKAGLGPEVARLLFERGIQDQESLKKFLEPSLEDLHDAYLLHDMDKAVERIRQAIEVRENILVYGDYDADGMTSASIVKESLEQLGAECRVYLPNRFTDGYGPNASVYKYFIEQDRISLIVTVDNGVAGHEAIALAQSMGVDVIVTDHHSMPETLPDAYAIVHPEHPDADYPFKYLAGCGVAFKLACALLEEVQVELLDLVAIGTIADMVSLTDENRILVQYGLEMLGHTQRIGLQEMLDMAGIAANEVTEETVGFQIAPRLNALGRLDDPNPAIDLLTGFDDEEAHEIALMIHQKNEERKEIVQSIYEEAKTMVDPEKKVQVLAKEGWNPGVLGIVAGRLLEELGQTVIVLNIKDGRAKGSARIVEPVDIFEALDPHRDLFIAFGGHAGAAGMTLEVEQLSDLSQVLEDYVREKGADAGGKNKLNLDEELDLEALSLETVKSFERLAPFGMDNQKPIFYIKNFQVESARTMGAGNAHLKLKISKGEASFEVVAFGQGRWATEFSQTKNLELAVKLSVNQWNGQTALQLMMVDARVEGVQLFNIRGKNAVLPEGVPVLDFPGELPNLAASEAIVVKNIPEDITQLKTIFQEQHFSAVYFKNDIDKAYYLTGYGTRDQFAKLYKTIYQFPEFDIRYKLKDLAAYLNIQQILLVKMIQVFEELGFVTIKDGVMTVNKEAPKREIGESQIYQNLKQTVKDQEMMALGTVQEIYDFLMEKE

SEQ ID NO: 5309 - protein, 252 aa, Streptococcus pneumoniae
MALVEFKNVEKYYGDYHALRNINLRFEKGQVVVLLGPSGSGKSTLIRTINGLETVDKGSLLVNGHQVAGASQKDLVPLRKEVGMVFQHFNIYPHKTVLENVTLAPIKVLGIDKKEAEKTAQKYLEFVNVWDKKDSYPAMLSGGQKQRIAIARGLAMHPELLLFDEPTSALDPETIGDVLAVMQKLAHDGMNMIIVTHEMGFAREVADRIIFMADGEVLVDTTDVDNFFDNPSKPRAQQFLSKIINHESDKVK

SEQ ID NO: 5310 - protein, 64 aa, Streptococcus pneumoniae
LRRGTKSFWLAPATWCPLTRRLPLSTVSKPLIVRIRVDFPEPEGPSRTTTCPFSKRRLMLRSAW

SEQ ID NO: 5311 - protein, 73 aa, Streptococcus pneumoniae
MRSATSRAKPISWVTMIMFIPSCASFCITARTSPIVSGSRADVGSSKRRSSGCIARPRAMAIRCFCPPDSMAG

SEQ ID NO: 5312 - protein, 264 aa, Streptococcus pneumoniae
MKKKFFLSALLISLFGLAAAKPVQADTSIADIQKRGELVVGVKQDVPNFGYKDPKTGTYSGIETDLAKMVADELKVKIRYVPVTAQTRGPLLDNEQVDMDIATFTITDERKKLYNFTSPYYTDASGFLVNKSAKIKKIEDLNGKTIGVAQGSITQRLITELGKKKGLKFKFVELGSYPELITSLHAHRIDAFSVDHSILSGYTSKRTALLDDSFKPSDYSIVTKKSNTELNDYLDNLVTKWSKDGSLQKLYDRYKLKPSSHTAD

SEQ ID NO: 5313 - protein, 225 aa, Streptococcus pneumoniae
MTDLSSWTAYFQDFGQFFNGFLFTLALAIGSFILAMVLGIFFGAMSTSKRPILRILARIFVEFYQNTPLLVQFVIVFYGLPLISDHIIMIPIYWTAVLCVGLYHGAYIAEVIRSGIQSIPSGQMEAALSQGFTYISAMRLIILPQAFRIILPPLTNQIVNLIKNTSTVAIISGVDLMFVTKSWSALNGNYIPAFLGAALLYFALCFPVAQFGRKMEQANKKAYSL

SEQ ID NO: 5314 - protein, 219 aa, Streptococcus pneumoniae
MESILEILTPDNLVFIFKGFGLTLYISLIAIILSTIIGTVLAVMRNGKNPILRIISSIYIEFVRNVPNLLWIFTIFLVFKMKSTPAGITAFTLFTSAALAEIIRGGLNAVDKGQYEAGMSQGFTSAQILYYIILPQAIRKMLPAIISQFVTVIKDTSLLYSVIALQELFGASQILMGRYFEPEQVFSLYILIALIYFSFNLAISNLSHMLAKRWQQAAE

SEQ ID NO: 5315 - protein, 400 aa, Streptococcus pneumoniae
MEFSMKSVKGLLFIIASFILTLLTWMNTSPQFMIPGLALTSLSLTFILATRLPLLESWFHGLEKVYTVHKFTAFLSIILLIFHNFSMGGLWGSRLAAQFGNLAIYIFASIILVAYLGKYIQYEAWRWIHRLVYLAYILGLFHIYMIMGNRLLTFNLLSFLVGSYALLGLLAGFYIIFLYQKISFPYLGKITHLKRLNHDTREIQIHLSRPFNYQSGQFAFLKIFQEGFESAPHPFSISGGHGQTLYFTVKNSGDHTKNIYDNLQAGSKVTLDRAYGHMIIEEGRENQVWIAGGIGITPFISYIREHPILDKRVHFYYSFRGEENAVYLDLLRDYAQKNPNFELHLIDSTKDGYLNFEQKEVPEHATVYMCGPISMMKALAKQIKKQNPKTELIYEGFKFK

SEQ ID NO: 5316 - protein, 293 aa, Streptococcus pneumoniae
MAIVSAEKFVQAARDNGYAVGGFNTNNLEWTQAILRAAEAKKAPVLIQTSMGAAKYMGGYKVARNLIANLVESMGITVPVAIHLDHGHYEDALECIEVGYTSIMFDGSHLPVEENLKLAKEVVEKAHAKGISVEAEVGTIGGEEDGIIGKGELAPIEDAKAMVETGIDFLAAGIGNIHGPYPVNWEGLDLDHLQKLTEALPGFPIVLHGGSGIPDEQIQAAIKLGVAKVNVNTECQIAFANATRKFARDYEANEAEYDKKKLFDPRKFLADGVKAIQASVEERIDVFGSEGKA

SEQ ID NO: 5317 - protein, 442 aa, Streptococcus pneumoniae
MKRTGLFAKIFIYTFSIFSVLVICLHLAIYFLFPSTYLSHRQETIGQKATAIAQSLEGKDRQSIEQVLDLYSQTSDIKGTVKGEMTEDKLEVKDSLPLDTDRQTTSLFIEEREVKTQDGGTMILQFLASMDLQKEAEQISLQFLPYTLLASFLISLLVAYIYARTIVAPILEIKRVTRRMMDLDSQVRLRVDSKDEIGNLKEQINSLYQHLLTVIADLHEKNEAILQLEKMKVEFLRGASHELKTPLASLKILIENMRENIGRYKDRDQYLGVALGIVDELNHHVLQILSLSSVQELRDDRETIDLLQMTQNLVKDYALLAKERELQIDNSLTHQQAYLNPSVMKLILSNLISNAIKHSVPGGLVRIGEREGELFIENSCSSEEQEKLAQSFSDNASRKVKGSGMGLFVVKSLLEHEKLAYRFEMEENRLTFFIDFPKVAQD

SEQ ID NO: 5318 - protein, 218 aa, Streptococcus pneumoniae
MKILIVEDEEMIREGVSDYLTDCGYETIEAADGQEALEQFSSYEVALVLLDIQMPKLNGLEVLAEIRKTSQVPVLMLTAFQDEEYKMSAFASLADGYLEKPFSLSLLKVRVDAIFKRYYDTGRIFSYKDTKVDFESYSASLAGQEVPINAKELEILDYLVKNEGRALTRSQIIDAVWKATDEVPFDRVIDVYIKELRKKLDLDCILTVRNVGYKLERK

SEQ ID NO: 5319 - protein, 459 aa, Streptococcus pneumoniae
MLHNAFAYVTRKFFKSIVIFLIILLMASLSLVGLSIKGATAKASQETFKNITNSFSMQINRRVNQGTPRGAGNIKGEDIKKITENKAIESYVKRINAIGDLTGYDLIETPETKKNLTADRAKRFGSSLMITGVNDSSKEDKFVSGSYKLVEGEHLTNDDKDKILLHKDLAAKHGWKVGDKVKLDSNIYDADNEKGAKETVEVTIKGLFDGHNKSAVTYSQELYENTAITDIHTAAKLYGYTEDTAIYGDATFFVTADKNLDDVMKELNGISGINWKSYTLVKSSSNYPALEQSISGMYKMANLLFWGSLSFSVLLLALLLSLWINARRKEVGILLSIGLKQASILGQFITESILIAIPALVSAYFLANYTARAIGNTVLANVTSGVAKQASKAAQASNLGGGAEVDGFSKTLSSLDISIQTSDFIIIFVLALVLVVLVMALASSNLLRKQPKELLLDGE

SEQ ID NO: 5320 - protein, 215 aa, Streptococcus pneumoniae
MTLLQLQDVTYRYKNTAEAVLYQIDYNFEPGKFYSIIGESGAGKSTLLSLLAGLDSPVEGSILFQGEDIRKKGYSYHRMHHISLVFQNYNLIDYLSPLENIRLVNKKASKNTLLELGLDESQIKRNVLQLSGGQQQRVAIARSLVSEAPVILADEPTGNLDPKTAGDIVELLKSLAQKTGKCVIVVTHSKEVAQASDITLELKDKKLTETRNTSK

SEQ ID NO: 5321 - protein, 425 aa, Streptococcus pneumoniae
MNPIQRSWAYVSRKRLRSFILFLILLVLLAGISACLTLMKSNKTVESNLYKSLNTSFSIKKIENGQTFKLSDLASVSKIKGLENVSPELETVAKLKDKEAVTGEQSVERDDLSAADNNLVSLTALEDSSKDVTFTSSAFNLKEGRHLQKGDSKKILIHEELAKKNGLSLHDKIGLDAGQSESGKGQTVEFEIIGIFSGKKQEKFTGLSSDFSENQVFTDYESSQTLLGNSEAQVSAARFYVENPKEMDGLMKQVENLALENQGYQVEKENKAFEQIKDSVATFQTFLTIFLYGMLIAGAGALILVLSLWLRERVYEVGILLALGKGKSSIFLQFCLEVVLVSLGALLPAFVAGNGITTYLLQTLLASGDQASLQDTLAKASSLSTSILSFAESYVFLVLLSCLSVALCFLFLFRKSPKEILSSIS

SEQ ID NO: 5322 - protein, 84 aa, Streptococcus pneumoniae
EGLEIIPYSIFFFFVFHKHFIFGFYNSLTNMEVTNESNPKILGLCQQKATEKFYFISDFIGLIGRNFSLFDSDEVQQNSRKQSL

SEQ ID NO: 5323 - DNA, 15 bp, Streptococcus pneumoniae
gtcttcaccacgggg

SEQ ID NO: 5324 - DNA, 11 bp, Streptococcus pneumoniae
gtggtgaagac

SEQ ID NO: 5325 - DNA, 2493 bp, Streptococcus pneumoniae
agtgaggaaagaatgaaaatcaataaaaaatatctagcaggttcagtggcagtccttgccctaagtgtttgttcctatgaacttggtcgtcaccaagctggtcaggttaagaaagagtctaatcgagtttcttatatagatggtgatcaggctggtcaaaaggcagaaaatttgacaccagatgaagtcagtaagagagaggggatcaacgccgaacaaattgttatcaagattacggatcaaggttatgtgacctctcatggagaccattatcattactataatggcaaggttccttatgatgccatcatcagtgaagaacttctcatgaaagatccgaattatcagttgaaggattcagacattgtcaatgaaatcaagggtggctatgtgattaaggtagacggaaaatactatgtttaccttaaagatgcggcccatgcggacaatattcggacaaaagaagagattaaacgtcagaagcaggaacacagtcataatcataactcaagagcagataatgctgttgctgcagccagagcccaaggacgttatacaacggatgatgggtatatcttcaatgcatctgatatcattgaggacacgggtgatgcttatatcgttcctcacggcgaccattaccattacattcctaagaatgagttatcagctagcgagttagctgctgcagaagcctattggaatgggaagcagggatctcgtccttcttcaagttctagttataatgcaaatccagttcaaccaagattgtcagagaaccacaatctgactgtcactccaacttatcatcaaaatcaaggggaaaacatttcaagccttttacgtgaattgtatgctaaacccttatcagaacgccatgtagaatctgatggccttattttcgacccagcgcaaatcacaagtcgaaccgccagaggtgtagctgtccctcatggtaaccattaccactttatcccttatgaacaaatgtctgaattggaaaaacgaattgctcgtattattccccttcgttatcgttcaaaccattgggtaccagattcaagaccagaacaaccaagtccacaatcgactccggaacctagtccaagtctgcaacctgcaccaaatcctcaaccagctccaagcaatccaattgatgagaaattggtcaaagaagctgttcgaaaagtaggcgatggttatgtctttgaggagaatggagtttctcgttatatcccagccaaggatctttcagcagaaacagcagcaggcattgatagcaaactggccaagcaggaaagtttatctcataagctaggagctaagaaaactgacctcccatctagtgatcgagaattttacaataaggcttatgacttactagcaagaattcaccaagatttacttgataataaaggtcgacaagttgattttgaggttttggataacctgttggaacgactcaaggatgtctcaagtgataaagtcaagttagtggatgatattcttgccttcttagctccgattcgtcatccagaacgtttaggaaaaccaaatgcgcaaattacctacactgatgatgagattcaagtagccaagttggcaggcaagtacacaacagaagacggttatatctttgatcctcgtgatataaccagtgatgagggggatgcctatgtaactccacatatgacccatagccactggattaaaaaagatagtttgtctgaagctgagagagcggcagcccaggcttatgctaaagagaaaggtttgacccctccttcgacagaccatcaggattcaggaaatactgaggcaaaaggagcagaagctatctacaaccgcgtgaaagcagctaagaaggtgccacttgatcgtatgccttacaatcttcaatatactgtagaagtcaaaaacggtagtttaatcatacctcattatgaccattaccataacatcaaatttgagtggtttgacgaaggcctttatgaggcacctaaggggtatactcttgaggatcttttggcgactgtcaagtactatgtcgaacatccaaacgaacgtccgcattcagataatggttttggtaacgctagcgaccatgttcaaagaaacaaaaatggtcaagctgataccaatcaaacggaaaaaccaagcgaggagaaacctcagacagaaaaacctgaggaagaaacccctcgagaagagaaaccacaaagcgagaaaccagagtctccaaaaccaacagaggaaccagaagaagaatcaccagaggaatcagaagaacctcaggtcgagactgaaaaggttgaagaaaaactgagagaggctgaagatttacttggaaaaatccaggatccaattatcaagtccaatgccaaagagactctcacaggattaaaaaataatttactatttggcacccaggacaacaatactattatggcagaagctgaaaaactattggctttattaaaggagagtaagtaa

SEQ ID NO: 5326 - protein, 830 aa, Streptococcus pneumoniae
SEERMKINKKYLAGSVAVLALSVCSYELGRHQAGQVKKESNRVSYIDGDQAGQKAENLTPDEVSKREGINAEQIVIKITDQGYVTSHGDHYHYYNGKVPYDAIISEELLMKDPNYQLKDSDIVNEIKGGYVIKVDGKYYVYLKDAAHADNIRTKEEIKRQKQEHSHNHNSRADNAVAAARAQGRYTTDDGYIFNASDIIEDTGDAYIVPHGDHYHYIPKNELSASELAAAEAYWNGKQGSRPSSSSSYNANPVQPRLSENHNLTVTPTYHQNQGENISSLLRELYAKPLSERHVESDGLIFDPAQITSRTARGVAVPHGNHYHFIPYEQMSELEKRIARIIPLRYRSNHWVPDSRPEQPSPQSTPEPSPSLQPAPNPQPAPSNPIDEKLVKEAVRKVGDGYVFEENGVSRYIPAKDLSAETAAGIDSKLAKQESLSHKLGAKKTDLPSSDREFYNKAYDLLARIHQDLLDNKGRQVDFEVLDNLLERLKDVSSDKVKLVDDILAFLAPIRHPERLGKPNAQITYTDDEIQVAKLAGKYTTEDGYIFDPRDITSDEGDAYVTPHMTHSHWIKKDSLSEAERAAAQAYAKEKGLTPPSTDHQDSGNTEAKGAEAIYNRVKAAKKVPLDRMPYNLQYTVEVKNGSLIIPHYDHYHNIKFEWFDEGLYEAPKGYTLEDLLATVKYYVEHPNERPHSDNGFGNASDHVQRNKNGQADTNQTEKPSEEKPQTEKPEEETPREEKPQSEKPESPKPTEEPEEESPEESEEPQVETEKVEEKLREAEDLLGKIQDPIIKSNAKETLTGLKNNLLFGTQDNNTIMAEAEKLLALLKESK

SEQ ID NO: 5327 - DNA, 1131 bp, Streptococcus pneumoniae
tcttttgatgaaacgagcaaggcagataccaagaccttgccgaaggtttctcagagtaccttgacatctattcctaaggttcaagcgcagacagaacacaaatcaatcaaaaacccaagccaggctgtgacagaggaaacttaccaaccacaagcaccgaaaaaacatagatttaagatgcgttacctgattttgttggccagccttgtattggtggcagcttctcttatttggatactatccagaactcctgcaaccattgccattccagatgtggcaggtcagacagttgcagaggccaaggcaacgctcaaaaaagccaattttgagattggtgaggagaagacagaggctagtgaaaaggtggaagaagggcggattatccgtacagatcctggcgctggaactggtcgaaaagaaggaacgaaaatcaatctggttgtctcatcaggcaaacaatccttccaaattagtaattatgtcggccggaaatcttctgatgttatcgcggaattaaaagagaaaaaagttccagataatttgattaaaattgaggaagaagagtcgaatgagagtgaggctggaacggtcctgaagcaaagtctaccagaaggtacgacctatgacttgagcaaggcaactcaaattgttttgacagtagctaaaaaagctacgacgattcaattagggaactatattggacggaactctacagaagtaatctcagaactcaagcagaagaaggttcctgagaatttgattaagatagaggaagaagagtccagcgaaagcgaacaaggaacgattatgaaacaaagtccaggtgccggaacgacttatgatgtgagtaaacctactcaaattgtcttgacagtagctaaaaaagttacaagtgttgccatgccgagttacattggttccagcttggagtttactaagaacaatttgagtcaaattgttgggattaaggaagctaatatagaagttgtagaagtgacgacagcgcctgcaggtagtgtagaaggcatggttgttgaacaaagtcctagagcaggtgaaaaggtagacctaaataagactagagtcaagatttcaatctacaaacctaaaacaacttcagctactccttaa

SEQ ID NO: 5328 - protein, 376 aa, Streptococcus pneumoniae
SFDETSKADTKTLPKVSQSTLTSIPKVQAQTEHKSIKNPSQAVTEETYQPQAPKKHRFKMRYLILLASLVLVAASLIWILSRTPATIAIPDVAGQTVAEAKATLKKANFEIGEEKTEASEKVEEGRIIRTDPGAGTGRKEGTKINLVVSSGKQSFQISNYVGRKSSDVIAELKEKKVPDNLIKIEEEESNESEAGTVLKQSLPEGTTYDLSKATQIVLTVAKKATTIQLGNYIGRNSTEVISELKQKKVPENLIKIEEEESSESEQGTIMKQSPGAGTTYDVSKPTQIVLTVAKKVTSVAMPSYIGSSLEFTKNNLSQIVGIKEANIEVVEVTTAPAGSVEGMVVEQSPRAGEKVDLNKTRVKISIYKPKTTSATP
